(19) United States
(12) Patent Application Publication
(10) Pub. No.: US 2024/0301038 A1
(43) Pub. Date: Sep. 12, 2024

(54) ANTIBODIES TO SARS-COV-2

(71) Applicants: Atreca, Inc., San Carlos, CA (US); University of Vermont and State Agricultural College, Brulington, VT (US)

(72) Inventors: Katherine L. Williams, San Carlos, CA (US); Daniel Eric Emerling, San Carlos, CA (US); Shaun M. Lippow, San Carlos, CA (US); Ngan Nguyen Atkins, San Carlos, CA (US); Jason Botten, Burlington, VT (US); Annalis Whitaker, Burlington, VT (US)

(73) Assignees: Atreca, Inc., San Carlos, CA (US); University of Vermont and State Agricultural College, Burlington, VT (US)

(21) Appl. No.: 18/552,107

(22) PCT Filed: Mar. 24, 2022
(86) PCT No.: PCT/US2022/071333

§ 371 Date: Sep. 22, 2023

Related U.S. Application Data
(60) Provisional application No. 63/166,521, filed on Mar. 26, 2021.
(60) Provisional application No. 63/271,087, filed on Oct. 22, 2021.

(51) Int. Cl. C07K 16/10; A61K 39/00; A61P 31/14; G01N 33/569; G01N 33/68

(52) U.S. Cl. CPC C07K 16/1003; A61P 31/14; G01N 33/56983; G01N 33/6854; A61K 2039/505; C07K 2317/565; C07K 2317/567; C07K 2317/76; G01N 2333/165

(57) ABSTRACT

Described herein are antibodies or variants thereof that specifically bind to coronavirus antigens, such as SARS-CoV-2 antigens. The antibodies can be neutralizing antibodies. Also provided are methods of using the antibodies, including methods of treating a subject infected with SARS-CoV-2, and methods of diagnosing a subject infected with SARS-CoV-2.

### RELATED APPLICATIONS

[0001] This application claims priority to U.S. Provisional Application No. 63/166,521, filed on Mar. 26, 2021, and U.S. Provisional Application No. 63/271,087, filed on Oct. 22, 2021. The entire content of said provisional applications is incorporated herein for all purposes.

### BACKGROUND

[0002] Coronavirus disease 19 (Covid-19) is the name of the disease caused by the virus known as Severe Acute Respiratory Syndrome Coronavirus 2 (SARS-CoV-2). The most well-defined mechanism by which SARS-CoV-2 infects cells is by binding to the ACE2 receptor on the surface of human cells. Following fusion of the viral and host cell membranes, the virus enters the cell and releases the viral RNA. The viral RNA is translated into proteins that are used to assemble new viral particles, that are then released into the body by the infected cell.

[0003] SARS-CoV-2 belongs to a class of genetically diverse viruses found in a wide range of host species, including birds and mammals (see Sun et al., “COVID-19: Epidemiology, Evolution, and Cross-Disciplinary Perspectives,” Volume 26, Issue 5, Pages e1-e2, 435-528 (May 2020)). Coronaviruses (CoVs) cause intestinal and respiratory infections in animals and in humans. SARS-CoV-2 is the seventh member of the Coronaviridae known to infect humans, and coronaviruses (CoVs). Bats are thought to be natural carriers for many SARS-like CoVs (species of Alphacoronavirus and Betacoronavirusare).

[0004] The symptoms of Covid-19 include fever, cough, shortness of breath (dyspnea), muscular soreness, chills, sore throat, and a new loss of taste or smell. Less common symptoms include gastrointestinal symptoms like nausea, vomiting, or diarrhea. In addition, older adults and people who have severe underlying medical conditions like heart or lung disease, or diabetes seem to be at higher risk for developing more serious complications from COVID-19 illness. For example, 8 out of 10 deaths reported in the U.S. have been in adults aged 65 years old and older. See the Centers for Disease Control website at https://www.cdc.gov/coronavirus/2019-ncov/symptoms.

[0005] The NIH classifies patients with COVID-19 into the following illness categories:
[0006] Asymptomatic or Presymptomatic Infection: Individuals who test positive for SARS-CoV-2 but have no symptoms
[0007] Mild Illness: Individuals who have any of various signs and symptoms (e.g., fever, cough, sore throat, malaise, headache, muscle pain) without shortness of breath, dyspnea, or abnormal imaging
[0008] Moderate Illness: Individuals who have evidence of lower respiratory disease by clinical assessment or imaging and a saturation of oxygen (SpO2) >93% on room air at sea level
[0009] Severe Illness: Individuals who have respiratory frequency >30 breaths per minute, SpO2≤93% on room air at sea level, ratio of arterial partial pressure of oxygen to fraction of inspired oxygen (PaO2/FiO2)<300, or lung infiltrates >50%
[0010] Critical Illness: Individuals who have respiratory failure, septic shock, and/or multiple organ dysfunction.

[0011] Current treatment options for COVID-19 include antivirals, steroids, immune-based therapies, neutralizing antibodies, and mechanical ventilators for patients with respiratory failure. Despite advances in treatment approaches over the past year, there is no identified cure for COVID-19 infection. MRNA-based vaccines from Moderna and BioNTech/Pfizer have both been issued Emergency Use Authorization by the FDA. However, these vaccines may have limited efficacy in vulnerable populations like those suffering from cancer or autoimmune disease. Accordingly, a need exists to develop safe and effective prophylactic and treatment options for COVID-19 infection.

### BRIEF SUMMARY

[0012] Described herein are antibodies that inhibit the binding of a coronavirus to a cell or reduce infection of a cell by a coronavirus, and methods of using the antibodies. In some embodiments, the coronavirus is a member of the betacoronavirus genus. In some embodiments, the coronavirus is a Severe Acute Respiratory Syndrome Coronavirus 2 (SARS-CoV-2). In some embodiments, the coronavirus is a variant of SARS-CoV-2 selected from the group consisting of the Alpha, Beta, Gamma, Delta, Epsilon, Mu and Omicron variants.

[0013] In some embodiments, the antibody is selected from the list of antibodies in Table 4 or 5. In some embodiments, the antibody comprises all six CDRs of an antibody selected from the group consisting of AB-009614, AB-010019, AB-009270, AB-009346, AB-009681, AB-009761, AB-009620, AB-009734, AB-009760, and AB-009281, or wherein the antibody comprises both the VH and VL of an antibody selected from the group consisting of AB-009614, AB-010019, AB-009270, AB-009346, AB-009681, AB-009761, AB-009620, AB-009734, AB-009760, and AB-009281.

[0014] In some embodiments, wherein the antibody inhibits binding of Alpha, Beta, Gamma, Delta, Epsilon, Mu and Omicron variants of SARS-CoV-2 and/or reduces infection of a cell by Alpha, Beta, Gamma, Delta, Epsilon, Mu and Omicron variants of SARS-CoV-2. In some embodiments, the antibody comprises all six CDRs of an antibody selected from the group consisting of AB-009270 and AB-009620, or wherein the antibody comprises both VH and VL of an antibody selected from the group consisting of AB-009270 and AB-009620.

[0015] In some embodiments, the antibody comprises the LCDRs and the HCDRs of an antibody listed in Table 4. In some embodiments, the antibody comprises a VH amino acid sequence and a VL amino acid sequence listed in Table 5, or ii) a VH amino acid sequence with at least 70% identity to the VH amino acid sequence in Table 5 and a VL amino acid sequence with at least 70% identity to the VL amino acid sequence in Table 5, wherein variations as compared to the VH amino acid sequence or the VL amino acid sequence in Table 5 are in the framework regions only.

[0016] In some embodiments, the antibody comprises HCDR1, HCDR2, and/or HCDR3 of an antibody listed in Table 4, or variants of the HCDR1, HCDR2, and/or HCDR3 in which 1 or more amino acids are substituted. In some embodiments, the antibody comprises the LCDR1, LCDR2, and/or LCDR3 of an antibody listed in Table 4, or variants of the LCDR1, LCDR2, and/or LCDR3 in which 1 or more amino acids are substituted.

[0017] In some embodiments, the antibody comprises the HCDR1, HCDR2, HCDR3, LCDR1, LCDR2, and LCDR3 of an antibody listed in Table 4, or variants of the HCDR1, HCDR2, HCDR3, LCDR1, LCDR2, and/or LCDR3 in which 1 or more amino acids are substituted. In some embodiments, the antibody comprises the HCDR1, HCDR2, HCDR3, LCDR1, LCDR2, and LCDR3 of an antibody listed in Table 4.

[0018] In some embodiments, the antibody comprises a heavy chain variable region sequence listed in Table 5, or a variant thereof. In some embodiments, the antibody comprises a light chain variable region sequence listed in Table 5, or a variant thereof. In some embodiments, the antibody comprises a heavy chain variable region sequence listed in Table 5 and a light chain variable region sequence listed in Table 5, or a variant thereof.

[0019] In some embodiments, the antibody comprises the LCDR1, LDCR2, LCDR3, and HCDR1, HCDR2, HCDR3 of antibody AB-009614 of Table 4, or variants of the LCDR1, LCDR2, LCDR3, HCDR1, HCDR2, and/or HCDR3 of antibody AB-009614 in which 1 or more amino acids are substituted. In some embodiments, the comprises the heavy chain variable region sequence of AB-009614 of Table 5, or a variant thereof. In some embodiments, the antibody comprises the light chain variable region sequence of AB-009614 of Table 5, or a variant thereof.

[0020] In some embodiments, the antibody binds to a spike glycoprotein (S-protein) encoded by the coronavirus. In some embodiments, the antibody binds to a membrane (M) protein, an envelope (E) protein, or a nucleocapsid (N) protein encoded by the coronavirus.

[0021] In some embodiments, the antibody binds to the S trimer encoded by the coronavirus. In some embodiments, the antibody binds to RBD, S1 monomer and S trimer. In some embodiments, the antibody binds to RBD, S1 monomer and S trimer and does not bind to the S2 protein. In some embodiments, the antibody binds to S2 and S trimer.

[0022] In some embodiments, the antibody inhibits binding of the coronavirus to a receptor on the surface of the cell. In some embodiments, the cell surface receptor is ACE2.

[0023] In some embodiments, the antibody is an isolated antibody. In some embodiments, the antibody is one that competes with any antibody disclosed herein.

[0024] In one aspect, a pharmaceutical composition is provided. In some embodiments, the pharmaceutical composition comprises an antibody described herein.

[0025] In another aspect, an expression vector is provided. In some embodiments, the expression vector comprises a heterologous polynucleotide encoding a heavy chain variable region listed in Table 5. In some embodiments, the expression vector comprises a heterologous polynucleotide encoding a light chain variable region listed in Table 5. In some embodiments, the expression vector comprises a heterologous polynucleotide encoding a cognate pair of heavy and light chain variable regions listed in Table 5. In another aspect, provided herein is a recombinant nucleic acid encoding an antibody or an antibody fragment of any one of the antibody disclosed herein.

[0026] In another aspect, a host cell is provided. In some embodiments, the host cell comprises an expression vector described herein.

[0027] In another aspect, a method of producing an antibody that inhibits binding of a coronavirus to a cell is described, the method comprising culturing a host cell comprising an expression vector described herein under conditions in which the polynucleotide encoding the heavy chain and the polynucleotide encoding the light chain are expressed.

[0028] In another aspect, a method of producing an antibody that inhibits binding of a coronavirus to a cell is described, the method comprising synthesizing the amino acid sequence of the heavy and/or light chains of an antibody described herein.

[0029] In another aspect, a method of inducing an immune response is described, the method comprising administering an antibody described herein to a subject. In some embodiments, the immune response comprises antibody-dependent cellular cytotoxicity (ADCC), antibody dependent cellular phagocytosis (ADCP), and/or complement-dependent cytotoxicity (CDC). In some embodiments, the antibody is administered intravenously.

[0030] In another aspect, a method of treating a patient infected with a coronavirus is described, the method comprising administering a therapeutically effective amount of an antibody or pharmaceutical composition described herein to the patient. In some embodiments, the antibody or pharmaceutical composition is administered intravenously. In some embodiments, the method further comprises administering a second treatment to the patient, wherein the second treatment is selected from an anti-viral agent or an anti-inflammatory agent. In some embodiments, the method further comprises administering a second treatment to the patient, wherein the second treatment comprises an antibody that binds SARS-CoV-2. In some embodiments, the second treatment comprises an antibody selected from the group consisting of casirivimab, imdevimab, etesevima, bamlanivimab, CT-P59, BRII-196, BRII-198, VIR-7831, AZD7442, AZD8895, AZD1061, TY027, SCTA01, MW33, JS016, DXP593, DXP604, STI-2020, BI 767551/DZIF-10c, COR-101, HLX70, ADM03820, HFB30132A, ABBV-47D11, C144-LS, C-135-LS, LY-CovMab, JMB2002, and ADG20. In some embodiments, the second treatment comprises an antibody selected from the group consisting of casirivimab, imdevimab, etesevima, and bamlanivimab.

[0031] In another aspect, a method of identifying a patient that is infected with a coronavirus is described, the method comprising detecting binding of an antibody described herein to a sample obtained from the patient, wherein binding greater than a negative control value indicates the patient is infected with the coronavirus. In some embodiments, the method is an in vitro method that is not practiced on an animal or human subject. In some embodiments, the method further comprises contacting a sample obtained from the patient with an antibody described herein. In some embodiments, the sample is a blood or serum sample. In some embodiments, the method further comprises treating the patient with an antibody or pharmaceutical composition described herein.

[0032] In another aspect, a method of identifying an antibody having anti-viral activity is described, the method comprising mutagenizing a polynucleotide encoding a heavy chain variable region, or a light chain variable region of an antibody described herein, expressing the antibody comprising the mutagenized heavy chain or light chain variable region; and selecting an antibody that inhibits binding of the virus to a cell.

[0033] In another aspect, an in vitro method for detecting an immune response is described, the method comprising identifying a cell infected with a coronavirus by contacting the cell with an antibody described herein, and detecting binding of the antibody to the cell.

[0034] In another aspect, a method of preventing infection of a subject with a coronavirus is described, the method comprising administering an antibody or pharmaceutical composition described herein, to the subject, wherein the antibody or pharmaceutical composition is administered at a dose sufficient to prevent or reduce infection of one or more host cells in the subject by the coronavirus. In some embodiments, the coronavirus is SARS-CoV-2.

[0035] In another aspect, a method of diagnosing a subject that is infected with a coronavirus is described, the method comprising detecting binding of an antibody described herein to a sample obtained from the subject, wherein binding greater than a negative control value indicates the subject is infected with the coronavirus. In some embodiments, the coronavirus is SARSCoV-2.

[0036] In another aspect, use of an antibody described herein in a method of inducing an immune response in vivo is described.

[0037] In another aspect, use of an antibody described herein in a method of treating a coronavirus infection is described. In some embodiments, the coronavirus is SARS-CoV-2.

### BRIEF DESCRIPTION OF THE DRAWINGS

[0038] FIGS. 1A-C shows binding of control antibodies to the RBD, S1 and S2 proteins of SARS-CoV-2.

[0039] FIG. 2 shows neutralization activity and binding of antibody AB-009614 to the RBD, S1, S2, and S trimer antigens of SARS-CoV-2.

[0040] FIG. 3 shows neutralization activity and binding of antibody AB-009270 to the RBD, S1, S2, and S trimer antigens of SARS-CoV-2.

[0041] FIG. 4 shows neutralization activity and binding of antibody AB-009281 to the RBD, S1, S2, and S trimer antigens of SARS-CoV-2.

[0042] FIG. 5 shows neutralization activity and binding of antibody AB-009346 to the RBD, S1, S2, and S trimer antigens of SARS-CoV-2.

[0043] FIG. 6 shows neutralization activity and binding of antibody AB-009615 to the RBD, S1, S2, and S trimer antigens of SARS-CoV-2.

[0044] FIG. 7 shows neutralization activity and binding of antibody AB-009760 to the RBD, S1, S2, and S trimer antigens of SARS-CoV-2.

[0045] FIG. 8 shows neutralization activity and binding of antibody AB-009620 to the RBD, S1, S2, and S trimer antigens of SARS-CoV-2.

[0046] FIG. 9 shows neutralization activity and binding of antibody AB-009661 to the RBD, S1, S2, and S trimer antigens of SARS-CoV-2.

[0047] FIG. 10 shows neutralization activity and binding of antibody AB-009761 to the RBD, S1, S2, and S trimer antigens of SARS-CoV-2.

[0048] FIG. 11 shows neutralization activity and binding of antibody AB-009769 to the RBD, S1, S2, and S trimer antigens of SARS-CoV-2.

[0049] FIG. 12 shows neutralization activity and binding of antibody AB-009681 to the RBD, S1, S2, and S trimer antigens of SARS-CoV-2.

[0050] FIG. 13 shows neutralization activity and binding of antibody AB-009734 to the RBD, S1, S2, S trimer and N antigens of SARS-CoV-2.

[0051] FIGS. 14A-B show alignment of certain antibodies VH and VL sequences with CDRs designated by Kabat and IMGT.

### DETAILED DESCRIPTION

[0052] As used in herein, the singular forms “a”, “an”, and “the” include plural referents unless the content clearly dictates otherwise. Thus, for example, reference to “an antibody” optionally includes a combination of two or more such molecules and the like.

[0053] The term “about” as used herein refers to the usual error range for the respective value readily known to the skilled person in this technical field, for example, ±20%, ±10%, or ±5%, are within the intended meaning of the recited value.

[0054] As used herein, the term “antibody” means an isolated or recombinant binding agent that comprises the necessary variable region sequences to specifically bind an antigenic epitope. Therefore, an “antibody” as used herein is any form of antibody or fragment thereof that exhibits the desired biological activity, e.g., binding the specific target antigen. Thus, it is used in the broadest sense and specifically covers a monoclonal antibody (including full-length monoclonal antibodies), human antibodies, chimeric antibodies, nanobodies, diabodies, multispecific antibodies (e.g., bispecific antibodies), and antibody fragments including but not limited to scFv, Fab, and the like so long as they exhibit the desired biological activity.

[0055] “Antibody fragments” comprise a portion of an intact antibody, for example, the antigen-binding or variable region of the intact antibody. Examples of antibody fragments include Fab, Fab′, F(ab)₂, and Fv fragments; diabodies; linear antibodies (e.g., Zapata et al., Protein Eng. 8(10): 1057-1062 (1995)); single-chain antibody molecules (e.g., scFv); and multispecific antibodies formed from antibody fragments. Papain digestion of antibodies produces two identical antigen-binding fragments, called “Fab” fragments, each with a single antigen-binding site, and a residual “Fc” fragment, a designation reflecting the ability to crystallize readily. Pepsin treatment yields an F(ab)₂ fragment that has two antigen combining sites and is still capable of cross-linking antigen.

[0056] An “antibody that binds to the same epitope” as a reference antibody refers to an antibody that blocks binding of the reference antibody to its antigen in a competition assay by 50% or more, and conversely, the reference antibody blocks binding of the antibody to its antigen in a competition assay by 50% or more.

[0057] As used herein, “V-region” refers to an antibody variable region domain comprising the segments of Framework 1, CDR1, Framework 2, CDR2, Framework 3, CDR3, and Framework 4. The heavy chain V-region, VH, is a consequence of rearrangement of a V-gene (HV), a D-gene (HD), and a J-gene (HJ), in what is known as V(D)J recombination during B-cell differentiation. The light chain V-region, VL, is a consequence of rearrangement of a V-gene (LV) and a J-gene (LJ).

[0058] As used herein, “complementarity-determining region (CDR)” refers to the three hypervariable regions (HVRs) in each chain that interrupt the four “framework” regions established by the light and heavy chain variable regions. The CDRs are the primary contributors to binding to an epitope of an antigen. The CDRs of each chain are referred to as CDR1, CDR2, and CDR3, numbered sequentially starting from the N-terminus, and are also identified by the chain in which the CDR is located. Thus, a V_{H} CDR3 (HCDR3) is in the variable domain of the heavy chain of the antibody in which it is found, whereas a V_{L} CDR3 (LCDR3) is the CDR3 from the variable domain of the light chain of the antibody in which it is found. The term “CDR” is used interchangeably with “HVR” when referring to CDR sequences.

[0059] The amino acid sequences of the CDRs and framework regions can be determined using various well known definitions in the art, e.g., Kabat, Chothia, international ImMunoGeneTics database (IMGT), and AbM (see, e.g., Chothia & Lesk, 1987, Canonical structures for the hypervariable regions of immunoglobulins. J. Mol. Biol. 196, 901-917; Chothia C. et al., 1989, Conformations of immunoglobulin hypervariable regions. Nature 342, 877-883; Chothia C. et al., 1992, structural repertoire of the human VH segments J. Mol. Biol. 227, 799-817; Al-Lazikani et al., J.Mol.Biol 1997, 273(4)). Definitions of antigen combining sites are also described in the following: Ruiz et al., IMGT, the international ImMunoGeneTics database. Nucleic Acids Res., 28, 219-221 (2000); and Lefranc, M.-P. IMGT, the international ImMunoGeneTics database. Nucleic Acids Res. January 1; 29(1):207-9 (2001); MacCallum et al, Antibody-antigen interactions: Contact analysis and binding site topography, J. Mol. Biol., 262 (5), 732-745 (1996); and Martin et al., Proc. Natl Acad. Sci. USA, 86, 9268-9272 (1989); Martin, et al., Methods Enzymol., 203, 121-153, (1991); Pedersen et al., Immunomethods, 1, 126, (1992); and Rees et al., In Sternberg M. J. E. (ed.), Protein Structure Prediction. Oxford University Press, Oxford, 141-172 1996). Reference to CDRs as determined by Kabat numbering is based, for example, on Kabat et al., Sequences of Proteins of Immunological Interest, 5th Ed. Public Health Service, National Institute of Health, Bethesda, MD (1991)). Chothia CDRs are determined as defined by Chothia (see, e.g., Chothia and Lesk J. Mol. Biol. 196:901-917 (1987)).

[0060] CDRs as shown in Table 4 are defined by IMGT and Kabat. The V_{H} CDRs as listed in Table 4 are defined as follows: HCDR1 is defined by combining Kabat and IMGT; HCDR2 is defined by Kabat; and the HCDR3 is defined by IMGT. The V_{L} CDRs as listed in Table 4 are defined by Kabat. FIGS. 14 A-B show alignment of VH and VL sequences of certain antibodies in Table 5 with CDRs designated by Kabat and IMGT. As known in the art, numbering and placement of the CDRs can differ depending on the numbering system employed. It is understood that disclosure of a variable heavy and/or variable light sequence includes the disclosure of the associated CDRs, regardless of the numbering system employed.

[0061] An “Fc region” refers to the constant region of an antibody excluding the first constant region immunoglobulin domain. Thus, Fc refers to the last two constant region immunoglobulin domains of IgA, IgD, and IgG, and the last three constant region immunoglobulin domains of IgE and IgM, and the flexible hinge N-terminal to these domains. For IgA and IgM Fc may include the J chain. For IgG, Fc comprises immunoglobulin domains Cγ2 and Cγ3 and the hinge between Cγ1 and Cγ2. It is understood in the art that the boundaries of the Fc region may vary, however, the human IgG heavy chain Fc region is usually defined to comprise residues C226 or P230 to its carboxyl-terminus, using the numbering according to the EU index as in Kabat et al. (1991, NIH Publication 91-3242, National Technical Information Service, Springfield, VA). The term “Fc region” may refer to this region in isolation or this region in the context of an antibody or antibody fragment. “Fc region” includes naturally occurring allelic variants of the Fc region as well as modifications that modulate effector function. Fc regions also include variants that do not result in alterations to biological function. For example, one or more amino acids can be deleted from the N-terminus or C-terminus of the Fc region of an immunoglobulin without substantial loss of biological function. Such variants can be selected according to general rules known in the art so as to have minimal effect on activity (see, e.g., Bowie, et al., Science 247:306-1310, 1990). For example, for IgG4 antibodies, a single amino acid substitution (S228P according to Kabat numbering; designated IgG4Pro) may be introduced to abolish the heterogeneity observed in recombinant IgG4 antibodies (see, e.g., Angal, et al., Mol Immunol 30:105-108, 1993).

[0062] An “EC₅₀” as used herein in the context of an Fc receptor engagement assay, refers to the half-maximal effective concentration, which is the concentration of an antibody that induces a response (signal generated in engagement assay) halfway between the baseline and maximum after a specified exposure time. In some embodiments, the “fold over EC50” is determined by dividing the EC50 of a reference antibody by the EC₅₀ of the test antibody.

[0063] The 50% inhibitory concentration (“IC₅₀”) is the concentration of antibody at which either pseudovirus or full-length virus infectivity is reduced by at least 50% as compared to viral infection in the absence of anti-SARS-CoV-2 antibody, or in the presence of a negative control antibody not expected neutralize SARS-CoV-2. The IC₅₀ may also reference the reciprocal dilution of plasma or serum at which 50% inhibition of viral infection is calculated. In some embodiments, neutralizing activity can also be measured as a function of the area under the positive portion of the neutralization curve.

[0064] The term “endpoint titer” refers to the lowest concentration of antibody or the highest dilution of plasma or serum where binding to an antigen is significantly higher than the negative control.

[0065] The term “equilibrium dissociation constant” abbreviated (K_{D}), refers to the dissociation rate constant (k_{d}, time⁻¹) divided by the association rate constant (kₐ, time⁻¹ M⁻¹). Equilibrium dissociation constants can be measured using any method. Thus, in some embodiments antibodies of the present disclosure have a K_{D} of less than about 50 nM, typically less than about 25 nM, or less than 10 nM, e.g., less than about 5 nM or than about 1 nM and often less than about 10 nM as determined by bio-layer interferometry analysis using a biosensor system such as an Octet® system performed at 25° C. In some embodiments, an antibody of the present disclosure has a K_{D} of less than 5×10⁻⁵ M, less than 10⁻⁵ M, less than 5×10⁻⁶ M, less than 10⁻⁶ M, less than 5×10⁻⁷ M, less than 10⁻⁷ M, less than 5×10⁻⁸ M, less than 10⁻⁸ M, less than 5×10⁻⁹ M, less than 10⁻⁹ M, less than 5×10⁻¹⁰ M, less than 10⁻¹⁰ M, less than 5×10⁻¹¹ M, less than 10⁻¹¹ M, less than 5×10⁻¹² M, less than 10⁻¹² M, less than 5×10⁻¹³ M, less than 10⁻¹³ M, less than 5×10⁻¹⁴ M, less than 10⁻¹⁴ M, less than 5×10⁻¹⁵ M, or less than 10⁻¹⁵ M or lower as measured as a bivalent antibody. In the context of the present invention, an “improved” K_{D} refers to a lower K_{D}. In some embodiments, an antibody of the present disclosure has a K_{D} of less than 5×10⁻⁵ M, less than 10⁻⁵ M, less than 5×10⁻⁶ M, less than 10⁻⁶ M, less than 5×10⁻⁷ M, less than 10⁻⁷ M, less than 5×10⁻⁸ M, less than 10⁻⁸ M, less than 5×10⁻⁹ M, less than 10⁻⁹ M, less than 5×10⁻¹⁰ M, less than 10⁻¹⁰ M, less than 5×10⁻¹¹ M, less than 10⁻¹¹ M, less than 5×10⁻¹² M, less than 10⁻¹² M, less than 5×10⁻¹³ M, less than 10⁻¹³ M, less than 5×10⁻¹⁴ M, less than 10⁻¹⁴ M, less than 5×10⁻¹⁵ M, or less than 10⁻¹⁵ M or lower as measured as a monovalent antibody, such as a monovalent Fab. In some embodiments, an anti-SARS-CoV-2 antibody of the present disclosure has K_{D} less than 100 pM, e.g., or less than 75 pM, e.g., in the range of 1 to 100 pM, when measured by biolayer interferometry using a biosensor system such as an Octet® system performed at 25° C. In some embodiments, an anti-SARS-CoV-2 antibody of the present disclosure has K_{D} of greater than 100 pM, e.g., in the range of 100-1000 pM or 500-1000 pM when measured by biolayer interferometry using a biosensor system such as a Octet® system performed at 25° C.

[0066] The term “monovalent molecule” as used herein refers to a molecule that has one antigen-binding site, e.g., a Fab or scFv.

[0067] The term “bivalent molecule” as used herein refers to a molecule that has two antigen-binding sites. In some embodiments, a bivalent molecule of the present invention is a bivalent antibody or a bivalent fragment thereof. In some embodiments, a bivalent molecule of the present invention is a bivalent antibody. In some embodiments, a bivalent molecule of the present invention is an IgG. In general. monoclonal antibodies have a bivalent basic structure. IgG and IgE have only one bivalent unit, while IgA and IgM consist of multiple bivalent units (2 and 5, respectively) and thus have higher valencies. This bivalency increases the avidity of antibodies for antigens.

[0068] The terms “monovalent binding” or “monovalently binds to” as used herein refer to the binding of one antigen-binding site to its antigen.

[0069] The terms “bivalent binding” or “bivalently binds to” as used herein refer to the binding of both antigen-binding sites of a bivalent molecule to its antigen. Preferably both antigen-binding sites of a bivalent molecule share the same antigen specificity.

[0070] The term “valency” as used herein refers to the number of different binding sites of an antibody for an antigen. A monovalent antibody comprises one binding site for an antigen. A bivalent antibody (e.g., a bivalent IgG antibody) comprises two binding sites for the same antigen.

[0071] The term “avidity” as used herein in the context of antibody binding to an antigen refers to the combined binding strength of multiple binding sites of the antibody. Thus, “bivalent avidity” refers to the combined strength of two binding sites

[0072] The term “affinity” as used herein refers to either the single or combined strength of one or both arms of an antibody (e.g., an IgG antibody) binding to either a simple or complex antigen expressing one or more epitopes. As defined here, the term “affinity” does not imply a specific number of valencies between the two binding partners.

[0073] The phrase “specifically (or selectively) binds” to an antigen or target or “specifically (or selectively) immunoreactive with,” when referring to a protein or peptide, refers to a binding reaction whereby the antibody binds to the antigen or target of interest. In the context of this invention, the antibody selectively binds to a SARS-CoV-2 antigen.

[0074] The terms “identical” or percent “identity,” in the context of two or more polynucleotide or polypeptide sequences, refer to two or more sequences or subsequences that are the same or have a specified percentage of amino acid residues that are the same (e.g., 100% identity) or have a specified percentage of nucleotides or amino acid residues are the same (e.g., at least 70%, at least 75%, at least 80%, 85%, 90%, 91%, 92%, 93%, 94%, 95%, 96%, 97%, 98%, 99%, or higher sequence identity; or 70%, 75%, 80%, 85%, 90%, 91%, 92%, 93%, 94%, 95%, 96%, 97%, 98%, or 99% sequence identity)) identity over a specified region, e.g., the length of the two sequences, when compared and aligned for maximum correspondence over a comparison window or designated region. Alignment for purposes of determining percent amino acid sequence identity can be performed in various methods, including those using publicly available computer software such as BLAST, BLAST-2, ALIGN or Megalign (DNASTAR) software. Examples of algorithms that are suitable for determining percent sequence identity and sequence similarity include the BLAST 2.0 algorithms, which are described in Altschul et al., Nuc. Acids Res. 25:3389-3402 (1977) and Altschul et al., J. Mol. Biol. 215:403-410 (1990). Thus, for purposes of this disclosure, BLAST 2.0 can be used with the default parameters to determine percent sequence identity.

[0075] The terms “corresponding to,” “determined with reference to,” or “numbered with reference to” when used in the context of the identification of a given amino acid residue in a polypeptide sequence, refers to the position of the residue of a specified reference sequence when the given amino acid sequence is maximally aligned and compared to the reference sequence. Thus, for example, an amino acid residue in a V_{H} region polypeptide “corresponds to” an amino acid in the V_{H} region of SEQ ID NO:1 when the residue aligns with the amino acid in SEQ ID NO:1 when optimally aligned to SEQ ID NO:1. The polypeptide that is aligned to the reference sequence need not be the same length as the reference sequence.

[0076] A “conservative” substitution as used herein refers to a substitution of an amino acid such that charge, polarity, hydropathy (hydrophobic, neutral, or hydrophilic), and/or size of the side group chain is maintained. Illustrative sets of amino acids that may be substituted for one another include (i) positively-charged amino acids Lys and Arg; and His at pH of about 6; (ii) negatively charged amino acids Glu and Asp; (iii) aromatic amino acids Phe, Tyr and Trp; (iv) nitrogen ring amino acids His and Trp; (v) aliphatic hydrophobic amino acids Ala, Val, Leu and Ile; (vi) hydrophobic sulfur-containing amino acids Met and Cys, which are not as hydrophobic as Val, Leu, and Ile; (vii) small polar uncharged amino acids Ser, Thr, Asp, and Asn (viii) small hydrophobic or neutral amino acids Gly, Ala, and Pro; (ix) amide-comprising amino acids Asn and Gin; and (xi) beta-branched amino acids Thr, Val, and Ile. Reference to the charge of an amino acid in this paragraph refers to the charge at pH 6-7.

[0077] The terms “nucleic acid” and “polynucleotide” are used interchangeably and as used herein refer to both sense and anti-sense strands of RNA, cDNA, genomic DNA, and synthetic forms and mixed polymers of the above. In particular embodiments, a nucleotide refers to a ribonucleotide, deoxynucleotide or a modified form of either type of nucleotide, and combinations thereof. The terms also include, but is not limited to, single- and double-stranded forms of DNA. In addition, a polynucleotide, e.g., a cDNA or mRNA, may include either or both naturally occurring and modified nucleotides linked together by naturally occurring and/or non-naturally occurring nucleotide linkages. The nucleic acid molecules may be modified chemically or biochemically or may contain non-natural or derivatized nucleotide bases, as will be readily appreciated by those of skill in the art. Such modifications include, for example, labels, methylation, the substitution of one or more of the naturally occurring nucleotides with an analog, internucleotide modifications such as uncharged linkages (e.g., methyl phosphonates, phosphotriesters, phosphoramidates, carbamates, and the like), charged linkages (e.g., phosphorothioates, phosphorodithioates, and the like), pendent moieties (e.g., polypeptides), intercalators (e.g., acridine, psoralen, and the like), chelators, alkylators, and modified linkages (e.g., alpha anomeric nucleic acids, and the like). The above term is also intended to include any topological conformation, including single-stranded, double-stranded, partially duplexed, triplex, hairpinned, circular, and padlocked conformations. A reference to a nucleic acid sequence encompasses its complement unless otherwise specified. Thus, a reference to a nucleic acid molecule having a particular sequence should be understood to encompass its complementary strand, with its complementary sequence. The term also includes codon-optimized nucleic acids that encode the same polypeptide sequence.

[0078] The term “vector,” as used herein, refers to a nucleic acid molecule capable of propagating another nucleic acid to which it is linked. The term includes the vector as a self-replicating nucleic acid structure as well as the vector incorporated into the genome of a host cell into which it has been introduced. A “vector” as used here refers to a recombinant construct in which a nucleic acid sequence of interest is inserted into the vector. Certain vectors can direct the expression of nucleic acids to which they are operatively linked. Such vectors are referred to herein as “expression vectors”.

[0079] A “substitution,” as used herein, denotes the replacement of one or more amino acids or nucleotides by different amino acids or nucleotides, respectively.

[0080] An “isolated” nucleic acid refers to a nucleic acid molecule that has been separated from a component of its natural environment. An isolated nucleic acid includes a nucleic acid molecule contained in cells that ordinarily contain the nucleic acid molecule, but the nucleic acid molecule is present extrachromosomally or at a chromosomal location that is different from its natural chromosomal location.

[0081] “Isolated nucleic acid encoding an antibody or fragment thereof” refers to one or more nucleic acid molecules encoding antibody heavy and light chains (or fragments thereof), including such nucleic acid molecule(s) in a single vector or separate vectors, and such nucleic acid molecule(s) present at one or more locations in a host cell.

[0082] The terms “host cell,” “host cell line,” and “host cell culture” are used interchangeably and refer to cells into which exogenous nucleic acid has been introduced, including the progeny of such cells. Thus, a host cell is a recombinant host cell and includes the primary transformed cell and progeny derived therefrom without regard to the number of passages.

[0083] A polypeptide “variant,” as the term is used herein, is a polypeptide that typically differs from a polypeptide specifically disclosed herein in one or more substitutions, deletions, additions and/or insertions. As used herein, a “variant” refers to an engineered sequence, rather than a naturally occurring sequence.

[0084] The term “comparable,” in the context of describing the strength of binding of two antibodies to the same target, refers to two dissociation constant (K_{D}) values calculated from two binding reactions that are within three (3) fold from each other. In other words, the ratio between the first K_{D} (the K_{D} of the binding reaction between the first antibody and the target) and the second K_{D} (the K_{D} of the binding reaction between the second antibody and the target) is within the range of 1:3 or 3:1, endpoints exclusive. A lower K_{D} value denotes stronger binding. For example, an antibody variant that has stronger binding as compared to a reference antibody binds to the target with a K_{D} that is at least ⅓ of the K_{D} measured against the same target for the reference antibody.

[0085] As used herein, “therapeutic agent” refers to an agent that when administered to a patient suffering from a disease, in a therapeutically effective dose, will cure, or at least partially arrest the symptoms of the disease and complications associated with the disease.

[0086] As used herein, a “neutralizing antibody” is an antibody that acts by preventing a virus or other infectious pathogen from infecting a host target cell.

[0087] As used herein a “B cell” refers to any cell that has at least one rearranged immunoglobulin gene locus.

[0088] As used herein, “variable region” refers to a variable nucleotide sequence that arises from a recombination event, for example, it can include a V, J, and/or D region of an immunoglobulin or T cell receptor sequence isolated from a T cell or B cell of interest, such as an activated T cell or an activated B cell.

[0089] As used herein “B cell variable immunoglobulin region” refers to a variable immunoglobulin nucleotide sequence isolated from a B cell. For example, a variable immunoglobulin sequence can include a V, J, and/or D region of an immunoglobulin sequence isolated from a B cell of interest such as a memory B cell, an activated B cell, or plasmablast.

[0090] As used herein “immunoglobulin region” refers to a contiguous portion of nucleotide sequence from one or both chains (heavy and light) of an antibody.

[0091] As used herein “identification region” refers to a nucleotide sequence label (e.g., a unique barcode sequence) that can be coupled to at least one nucleotide sequence for, e.g., later identification of at least one nucleotide sequence.

[0092] As used herein, “barcode” or “barcode sequence” refers to any unique sequence label that can be coupled to at least one nucleotide sequence for, e.g., later identification of at least one nucleotide sequence.

[0093] The term “paired” heavy and light chains, or “paired” heavy and light chain variable regions, or “cognate pair” refers to native pairs of immunoglobulin heavy and light variable regions that are expressed by a single B cell.

### Compositions

[0094] Described herein are antibodies or variants thereof that inhibit the binding of SARS-CoV-2 to a cell or reduce or prevent infection of a cell by SARS-CoV-2. In some embodiments, the antigen-binding protein is an antibody or antigen-binding fragment thereof.

Antibodies that Bind to SARS-CoV-2 Antigens

[0095] Described herein are antibodies or variants thereof that specifically bind to coronavirus antigens. In some embodiments, the antibodies are neutralizing antibodies. In some embodiments, the antibodies specifically bind to SARS-CoV-2 antigens. In some embodiments, the antibodies specifically bind to a protein antigen that is translated from a viral RNA, such as a SARS-CoV-2 viral RNA. In some embodiments, the antibodies specifically bind to a viral spike protein. In some embodiments, the antibodies specifically bind to the SARS-CoV-2 spike protein. In some embodiments, the antibodies specifically bind to either the S1 or S2 subunits of the SARS-CoV-2 spike protein. In some embodiments, the antibodies specifically bind to a SARS-CoV-2 S1 or S2 glycoprotein. In some embodiments, the antibodies specifically bind to the ectodomain of S1 and S2. In some embodiments, the antibodies specifically bind to the receptor-binding domain (RBD) of the S1 subunit. In some embodiments, the antibodies specifically bind to the S2 subunit. In some embodiments, the antibodies specifically bind to a SARS-CoV-2 membrane (M) protein. In some embodiments, the antibodies specifically bind to a SARS-CoV-2 envelope (E) protein. In some embodiments, the antibodies specifically bind to a SARS-CoV-2 nucleocapsid (N) protein.

[0096] In some embodiments, the antibody is a neutralizing antibody against SARS-CoV-2. Non-limiting examples of such antibody include AB-009614, AB-010019, AB-009270, AB-009346, AB-009681, AB-009761, AB-009620, AB-009734, AB-009760, and AB-009281. The CDRs and the VH and VL sequences of each of the antibodies are disclosed in Table 4. The VH and VL sequences of these antibodies are disclosed in Table 5. In some embodiments, the antibody is a pan-neutralizing antibody, i.e., the antibody is capable of neutralizing Alpha, Beta, Gamma, Delta, Epsilon, Mu, and Omicron variants of SARS-CoV-2. Such pan-neutralizing antibodies include, for example, AB-009620.

[0097] It is thought that the SARS-CoV-2 virus utilizes components of the renin-angiotensin system (RAS) (ACE2 and TMPRSS2) to enter cells. Current research indicates that SARS-CoV-2 binds to the cell surface receptor Angiotensin-converting enzyme 2 (ACE2). See, e.g., Walls et al., 2020, Cell 180, 1-12, Mar. 19, 2020: doi.org/10.1016/j.cell.2020.02.058. Thus, in some embodiments, the antibodies specifically bind to the ACE2 protein (www.uniprot.org/uniprot/Q9BYF1), or an antigenic fragment thereof. In some embodiments, the antibodies specifically bind to TMPRSS2 (serine protease, uniprot O15393), or an antigenic fragment thereof.

[0098] In some embodiments, the antibodies inhibit the binding of the coronavirus to a cell more efficiently as compared to a control, non-specific antibody. In some embodiments, the antibodies reduce infection of a cell by a coronavirus. The term “reduce infection” refers to the experimental antibody decreasing the number of viruses that enter a cell as compared to a control antibody.

[0099] In some embodiments, the antibodies inhibit the binding of the coronavirus to the ACE2 receptors on the surface of human cells. In some embodiments, the antibodies are neutralizing antibodies.

[0100] The antibodies described herein can be IgG, IgM, or IgA antibodies.

[0101] In some embodiments, the antibodies described herein are selected from the antibodies listed in Table 4 or Table 5. In some embodiments, the antibodies described herein comprise a heavy chain variable region sequence listed in Table 5, or a non-naturally occurring variant thereof. In some embodiments, the antibodies described herein comprise a light chain variable region sequence listed in Table 5, or a non-naturally occurring variant thereof. In some embodiments, the antibodies described herein comprise a nucleic acid sequence encoding an amino acid sequence listed in Table 5, or a non-naturally occurring variant thereof. In some embodiments, the antibodies described herein comprise a nucleic acid sequence encoding a heavy chain variable region sequence listed in Table 5, or a non-naturally occurring variant thereof. In some embodiments, the antibodies described herein comprise a nucleic acid sequence encoding a light chain variable region sequence listed in Table 5, or a non-naturally occurring variant thereof.

[0102] The antibodies described herein can be monoclonal antibodies. In some embodiments, the antibody is an antibody fragment, e.g., a Fv, Fab, Fab′, scFv, diabody, or F(ab)₂ fragment. In another embodiment, the antibody is a full-length antibody, e.g., an IgG antibody or other antibody class or isotype as defined herein. For a review of certain antibody fragments, see Hudson et al. Nat. Med. 9: 129-134 (2003). Antibody fragments can be made by various techniques, including but not limited to proteolytic digestion of an intact antibody as well as production by recombinant host cells (e.g., E. coli or phage), as described herein.

[0103] In some embodiments an antibody described herein is in a monovalent format. In some embodiments, the antibody is in a fragment format, e.g., an Fv, Fab, Fab′, scFv, diabody, or F(ab)₂ fragment.

[0104] In some embodiments, an antibody of the present disclosure is employed in a bispecific or multi-specific format. For example, in some embodiments, the antibody may be incorporated into a bispecific or multi-specific antibody that comprises a further binding domain that binds to the same or a different antigen.

[0105] In some embodiments, an antibody of the present disclosure comprises an Fc region that has effector function, e.g., exhibits antibody-dependent cellular cytotoxicity ADCC. In some embodiments, the Fc region may be an Fc region engineered to alter one or more functional properties of the antibody, such as serum half-life, complement fixation, Fc receptor binding, and/or ADCC. Furthermore, an antibody of the disclosure may be chemically modified (e.g., one or more chemical moieties can be attached to the antibody) to alter its glycosylation or to alter other functional properties of the antibody. Additional modifications may also be introduced. For example, the antibody can be linked to one of a variety of polymers, for example, polyethylene glycol.

### Variants

[0106] Also provided are variants of the antibodies described herein. For example, the antibodies of the disclosure can be modified to include one or more amino acid substitutions in a heavy and/or light chain variable region CDR sequence in Table 4. In some embodiments, the heavy and/or light chain variable region CDR sequences can be modified to include 1, 2, 3, 4, or 5 amino acid substitutions relative to the sequence in Table 4. The heavy and/or light chain variable regions can also include variants in the framework region. In some embodiments, one or more of the four framework regions (Framework 1, Framework 2, Framework 3 and/or Framework 4) can be modified to include one or more amino acid substitutions (e.g., 1, 2, 3, 4, 5, or more amino acid substitutions) relative to the natural or wild-type frameword sequence. In some embodiments, the modifications to the framework regions do not decrease binding affinity of the antibody to target SARS-CoV-2 antigens or epitopes. In some embodiments, the heavy and/or light chain variable regions can be modified to include variants in one or more of the framework regions only. In some embodiments, the heavy and/or light chain variable regions can be modified to include variants in one or more of the framework regions and not variants in the CDR sequences. Thus, in some embodiments, the antibody can comprise a modified VH region having at least 70% sequence identity (e.g., at least 70%, 75%, 80%, 85%, 90%, 91%, 92%, 93%, 94%, 95%, 96%, 97%, 98%, 99% sequence identity) to a VH amino acid sequence in Table 5, wherein the sequence variations relative to the VH amino acid sequence in Table 5 are in the framework region only. In some embodiments, the antibody can comprise a modified VL region having at least 70% sequence identity (e.g., at least 70%, 75%, 80%, 85%, 90%, 91%, 92%, 93%, 94%, 95%, 96%, 97%, 98%, 99% sequence identity) to a VH amino acid sequence in Table 5, wherein the sequence variations relative to the VL amino acid sequence in Table 5 are in the framework region only. In some embodiments, an antibody disclosed herein comprises all six CDRs of an antibody in Table 4, and the antibody comprises heavy chain framework regions (all four framework regions together) having at least 70% sequence identity to the heavy chain framework regions in the same antibody in Table 4, and/or light chain framework regions (all four framework regions together) having at least 70% sequence identity to the light chain framework regions of the same antibody in Table 4.

### Pharmaceutical Compositions

[0107] In a further aspect, provided herein are pharmaceutical compositions for administration of an anti-SARS-CoV-2 antibody described herein to a mammalian subject, such as a human or companion animal, who is either at risk of infection with SARS-CoV-2, who has been exposed to a known SARS-CoV-2 case or who is infected with SARS-CoV-2 or has symptoms of coronavirus disease 2019 (COVID-19). The pharmaceutical composition can be administered in an amount and according to a schedule sufficient to prevent infection by SARS-CoV-2, to prevent development of disease following exposure to SARS-CoV-2, to prevent development of disease following exposure to SARS-CoV-2, or to reduce a symptom of COVID-19 disease. Such compositions may comprise an antibody described herein, or a polynucleotide encoding the antibody, and a pharmaceutically acceptable diluent or carrier. In some embodiments, a polynucleotide encoding the antibody may be contained in a plasmid vector for delivery, or a viral vector. In some embodiments, the pharmaceutical composition comprises a therapeutically effective amount of the antibody. As used herein, a “therapeutically effective dose” or a “therapeutically effective amount” refers to an amount sufficient to prevent, cure, or treat one or more symptoms of COVID-19 disease. A therapeutically effective dose can be determined by monitoring a patient's response to therapy. Typical benchmarks indicative of a prophylactically effective dose includes prevention of SARS-CoV-2 infection, or if infected, reduced severity of COVID-19 disease symptoms. Typical benchmarks indicative of a therapeutically effective dose includes amelioration or prevention of symptoms of COVID-19 disease in the patient, including, for example, reduction in lung inflammation. Amounts effective for either prophylactic or therapeutic use will depend upon the severity of the disease and the general state of the patient's health, including other factors such as age, weight, gender, administration route, and the like. Single or multiple administrations of the antibody will be dependent on the dosage and frequency as required and tolerated by the patient.

[0108] As used herein, a “prophylactically effective dose” or a “prophylactically effective amount” refers to an amount sufficient to prevent infection by SARS-CoV-2 or onset of one or more symptoms of COVID-19 disease.

[0109] Various pharmaceutically acceptable diluents, carriers, and excipients, and techniques for the preparation and use of pharmaceutical compositions will be known to those of skill in the art in light of the present disclosure. Illustrative pharmaceutical compositions and pharmaceutically acceptable diluents, carriers, and excipients are also described in Remington: The Science and Practice of Pharmacy 20th Ed. (Lippincott, Williams & Wilkins 2012). In particular embodiments, each carrier, diluent or excipient is “acceptable” in the sense of being compatible with the other ingredients of the pharmaceutical composition and not injurious to the subject. Often, the pharmaceutically acceptable carrier is an aqueous pH-buffered solution. Some examples of materials that can serve as pharmaceutically-acceptable carriers, diluents or excipients include water; buffers, e.g., phosphate-buffered saline; sugars, such as lactose, glucose, and sucrose; starches, such as corn starch and potato starch; cellulose, and its derivatives, such as sodium carboxymethyl cellulose, ethyl cellulose, and cellulose acetate; powdered tragacanth; malt; gelatin; talc; excipients, such as cocoa butter and suppository waxes; oils, such as peanut oil, cottonseed oil, safflower oil, sesame oil, olive oil, corn oil, and soybean oil; glycols, such as propylene glycol; polyols, such as glycerin, sorbitol, mannitol, and polyethylene glycol; esters, such as ethyl oleate and ethyl laurate; agar; buffering agents, such as magnesium hydroxide and aluminum hydroxide; alginic acid; pyrogen-free water; isotonic saline; Ringer's solution; ethyl alcohol; phosphate buffer solutions; and other non-toxic compatible substances employed in pharmaceutical formulations. Wetting agents, emulsifiers, and lubricants, such as sodium lauryl sulfate and magnesium stearate, as well as coloring agents, release agents, coating agents, sweetening, flavoring, and perfuming agents, preservatives and antioxidants can also be present in the compositions.

[0110] The pharmaceutical composition can be formulated for any suitable route of administration, including for example, systemic, parenteral, intrapulmonary, intranasal, or local administration. Parenteral administration can include intramuscular, intravenous (e.g., as a bolus or by continuous infusion over a period of time), intraarterial, intraperitoneal, intracerobrospinal, intrasynovial, inhalation, oral or subcutaneous administration. In certain embodiments, the pharmaceutical composition is formulated for intravenous administration and has a concentration of antibody of 10-100 mg/mL, 10-50 mg/mL, 20 to 40 mg/mL, or about 30 mg/mL. In certain embodiments, the pharmaceutical composition is formulated for subcutaneous injection and has a concentration of antibody of 50-500 mg/mL, 50-250 mg/mL, or 100 to 150 mg/mL, and a viscosity less than 50 cP, less than 30 cP, less than 20 cP, or about 10 cP. In some embodiments, the pharmaceutical compositions are liquids or solids. In particular embodiments, the pharmaceutical compositions are formulated for parenteral, e.g., intravenous, subcutaneous, intraperiotoneal, or intramuscular administration. A subject may be administered an antibody or pharmaceutical composition comprising an antibody of the present disclosure one or more times; and may be administered before, after, or concurrently with another therapeutic agent as further described below.

[0111] Formulations include those in which the antibody is encapsulated in micelles, liposomes or drug-release capsules (active agents incorporated within a biocompatible coating designed for slow-release); ingestible formulations; formulations for topical use, such as creams, ointments, and gels; and other formulations such as inhalants, aerosols, and sprays.

[0112] In some embodiments, e.g., for parenteral administration, the antibodies or antigen-binding fragments thereof are formulated in a unit dosage injectable form (solution, suspension, emulsion) in association with a pharmaceutically acceptable, parenteral vehicle. Examples of such vehicles are water, saline, Ringer's solution, dextrose solution, and 5% human serum albumin. Nonaqueous vehicles such as fixed oils and ethyl oleate may also be used.

[0113] The dose and dosage regimen depends upon a variety of factors readily determined by a physician, such as the nature of the viral infection, the characteristics of the subject, and the subject's history. In particular embodiments, the amount of antibody or antigen-binding fragment thereof administered or provided to the subject is in the range of about 0.1 mg/kg to about 50 mg/kg of the subject's body weight. Depending on the type and severity of the infection, in certain embodiments, about 0.1 mg/kg to about 50 mg/kg body weight (e.g., about 0.1-15 mg/kg/dose) of antibody or antigen-binding fragment thereof may be provided as an initial candidate dosage to the patient, whether, for example, by one or more separate administrations, or by continuous infusion. The progress of the therapy is readily monitored by conventional methods and assays and based on criteria known to the physician or other persons of skill in the art.

### Vectors

[0114] In some aspects, a composition described herein includes a vector. In some embodiments, the vector comprises one or more polynucleotide sequences that encode an antibody described herein or encode a heavy and light chain described herein. In some embodiments, the vector comprises one or more polynucleotide sequences that encode a cognate pair of heavy and light chains described herein. Vectors can be used in the transformation of a host cell with a nucleic acid sequence. In some aspects, a vector can include one or more polynucleotides encoding an antibody described herein. In one embodiment, a library of nucleic acid sequences encoding an antibody described herein may be introduced into a population of cells, thereby allowing screening of a library. The term “vector” is used to refer to a carrier nucleic acid molecule into which a nucleic acid sequence can be inserted for introduction into a cell where it can be replicated. A nucleic acid sequence can be “exogenous” or “heterologous” which means that it is foreign to the cell into which the vector is being introduced or that the sequence is homologous to a sequence in the cell but in a position within the host cell nucleic acid in which the sequence is ordinarily not found. Vectors include plasmids, cosmids, and viruses (e.g., bacteriophage). One of skill in the art may construct a vector through standard recombinant techniques, which are described in Maniatis et al., 1988 and Ausubel et al., 1994, both of which references are incorporated herein by reference. In some aspects, a vector can be a vector with the constant regions of an antibody pre-engineered in. In this way, one of skill can clone just the VDJ regions of an antibody of interest and clone those regions into the pre-engineered vector.

[0115] The term “expression vector” refers to a vector containing a nucleic acid sequence coding for at least part of a gene product capable of being transcribed. In some cases, RNA molecules are then translated into a protein, polypeptide, or peptide. Expression vectors can contain a variety of “control sequences,” which refer to nucleic acid sequences for the transcription and possibly translation of an operably linked coding sequence in a particular host organism. In addition, to control sequences that govern transcription and translation, vectors and expression vectors may contain nucleic acid sequences that serve other functions as well.

[0116] In some aspects, a vector can include a promoter. In some aspects, a vector can include an enhancer. A “promoter” is a control sequence that is a region of a nucleic acid sequence at which initiation and rate of transcription are controlled. It may contain genetic elements at which regulatory proteins and molecules may bind such as RNA polymerase and other transcription factors. The phrases “operatively positioned,” “operatively linked,” “under control,” and “under transcriptional control” mean that a promoter is in a correct functional location and/or orientation in relation to a nucleic acid sequence to control transcriptional initiation and/or expression of that sequence. A promoter may or may not be used in conjunction with an “enhancer,” which refers to a cis-acting regulatory sequence involved in the transcriptional activation of a nucleic acid sequence.

[0117] A promoter may be one naturally associated with a gene or sequence, as may be obtained by isolating the 5′non-coding sequences located upstream of the coding segment and/or exon. Such a promoter can be referred to as “endogenous.” Similarly, an enhancer may be one naturally associated with a nucleic acid sequence, located either downstream or upstream of that sequence. Alternatively, certain advantages will be gained by positioning the coding nucleic acid segment under the control of a recombinant or heterologous promoter, which refers to a promoter that is not normally associated with a nucleic acid sequence in its natural environment. A recombinant or heterologous enhancer refers also to an enhancer not normally associated with a nucleic acid sequence in its natural environment. Such promoters or enhancers may include promoters or enhancers of other genes, and promoters or enhancers isolated from any other prokaryotic cell, promoters or enhancers not “naturally occurring,” i.e., containing different elements of different transcriptional regulatory regions, and/or mutations that alter expression. In addition to producing nucleic acid sequences of promoters and enhancers synthetically, sequences may be produced using recombinant cloning and/or nucleic acid amplification technology, including PCR, in connection with the compositions disclosed herein (see U.S. Pat. Nos. 4,683,202, 5,928,906, each incorporated herein by reference).

[0118] In some aspects, a promoter and/or enhancer that effectively directs the expression of the DNA segment in the cell type chosen for expression. One example of such promoter that may be used is the E. coli arabinose or T7 promoter. Those of skill in the art of molecular biology generally are familiar with the use of promoters, enhancers, and cell type combinations for protein expression, for example, see Sambrook et al. (1989), incorporated herein by reference. The promoters employed may be constitutive, tissue-specific, inducible, and/or useful under the appropriate conditions to direct high-level expression of the introduced DNA segment, such as is advantageous in the large-scale production of recombinant proteins and/or peptides. The promoter may be heterologous or endogenous.

[0119] In some aspects, vectors can include initiation signals and/or internal ribosome binding sites. A specific initiation signal also may be included for efficient translation of coding sequences. These signals include the ATG initiation codon or adjacent sequences. Exogenous translational control signals, including the ATG initiation codon, may need to be provided. One of ordinary skill in the art would readily be capable of determining this and providing the necessary signals. It is well known that the initiation codon must be “in-frame” with the reading frame of the desired coding sequence to ensure translation of the entire insert. The exogenous translational control signals and initiation codons can be either natural or synthetic. The efficiency of expression may be enhanced by the inclusion of appropriate transcription enhancer elements.

[0120] In some aspects, a vector can include sequences that increase or optimize the expression level of the DNA segment encoding the gene of interest. An example of such sequences includes the addition of introns in the expressed mRNA (Brinster, R. L. et al. (1988) Introns increase transcriptional efficiency in transgenic mice. Proc. Natl. Acad. Sci. USA 85, 836-40; Choi, T. et al. (1991) A generic intron increases gene expression in transgenic mice. Mol. Cell. Biol. 11, 3070-4). Another example of a method for optimizing the expression of the DNA segment is “codon optimization”. Codon optimization involves the insertion of silent mutations in the DNA segment to reduce the use of rare codons to optimize protein translation (Codon engineering for improved antibody expression in mammalian cells. Carton J M, Sauerwald T, Hawley-Nelson P, Morse B, Peffer N, Beck H, Lu J, Cotty A, Amegadzie B, Sweet R. Protein Expr Purif. 2007 October; 55(2):279-86. Epub 2007 Jun. 16.).

[0121] In some aspects, a vector can include multiple cloning sites. Vectors can include a multiple cloning site (MCS), which is a nucleic acid region that contains multiple restriction enzyme sites, any of which can be used in conjunction with standard recombinant technology to digest the vector (see Carbonelli et al., 1999, Levenson et al., 1998, and Cocea, 1997, incorporated herein by reference.) “Restriction enzyme digestion” refers to catalytic cleavage of a nucleic acid molecule with an enzyme that functions only at specific locations in a nucleic acid molecule. Many of these restriction enzymes are commercially available. The use of such enzymes is understood by those of skill in the art. Frequently, a vector is linearized or fragmented using a restriction enzyme that cuts within the MCS to enable exogenous sequences to be ligated to the vector. “Ligation” refers to the process of forming phosphodiester bonds between two nucleic acid fragments, which may or may not be contiguous with each other. Techniques involving restriction enzymes and ligation reactions are well known to those of skill in the art of recombinant technology.

[0122] In some aspects, a vector can include a termination signal. The vectors or constructs will generally comprise at least one termination signal. A “termination signal” or “terminator” is comprised of the DNA sequences involved in the specific termination of an RNA transcript by an RNA polymerase. Thus, in certain embodiments, a termination signal that ends the production of an RNA transcript is contemplated. A terminator may be necessary in vivo to achieve desirable message levels.

[0123] Terminators contemplated for use include any known terminator of transcription described herein or known to one of ordinary skill in the art, including but not limited to, for example, rho dependent or rho independent terminators. In certain embodiments, the termination signal may be a lack of transcribable or translatable sequence, such as due to a sequence truncation.

[0124] In some aspects, a vector can include an origin of replication.

[0125] In order to propagate a vector in a host cell, it may contain one or more origins of replication sites (often termed “ori”), which is a specific nucleic acid sequence at which replication is initiated.

[0126] In some aspects, a vector can include one or more selectable and/or screenable markers. In certain embodiments, cells containing a nucleic acid construct may be identified in vitro or in vivo by including a marker in the expression vector. Such markers would confer an identifiable change to the cell permitting easy identification of cells containing the expression vector. Generally, a selectable marker is one that confers a property that allows for selection. A positive selectable marker is one in which the presence of the marker allows for its selection, while a negative selectable marker is one in which its presence prevents its selection. An example of a positive selectable marker is a drug resistance marker.

[0127] Usually, the inclusion of a drug selection marker aids in the cloning and identification of transformants, for example, genes that confer resistance to neomycin, puromycin, hygromycin, DHFR, GPT, zeocin and histidinol are useful selectable markers. In addition to markers conferring a phenotype that allows for the discrimination of transformants based on the implementation of conditions, other types of markers including screenable markers such as GFP, whose basis is colorimetric analysis, are also contemplated. Alternatively, screenable enzymes such as chloramphenicol acetyltransferase (CAT) may be utilized. One of skill in the art would also know how to employ immunologic markers, possibly in conjunction with FACS analysis. The marker used is not believed to be important, so long as it is capable of being expressed simultaneously with the nucleic acid encoding a gene product. Further examples of selectable and screenable markers are well known to one of skill in the art.

[0128] In one aspect, the vector can express DNA segments encoding multiple polypeptides of interest. For example, DNA segments encoding both the immunoglobulin heavy chain and light chain can be encoded and expressed by a single vector. In one aspect, both DNA segments can be included on the same expressed RNA and internal ribosome binding site (IRES) sequences used to enable expression of the DNA segments as separate polypeptides (Pinkstaff J K, Chappell S A, Mauro V P, Edelman G M, Krushel L A., Internal initiation of translation of five dendritically localized neuronal mRNAs., Proc Natl Acad Sci USA. 2001 Feb. 27; 98(5):2770-5. Epub 2001 Feb. 20.). In another aspect, each DNA segment has its own promoter region resulting in the expression of separate mRNAs (Andersen C R, Nielsen L S, Baer A, Tolstrup A B, Weilguny D. Efficient Expression from One CMV Enhancer Controlling Two Core Promoters. Mol Biotechnol. 2010 Nov. 27. [Epub ahead of print]).

### Host Cells and Expression Systems

[0129] In some aspects, a composition can include a host cell. In some aspects, a host cell can include a polynucleotide or vector described herein. In some aspects, a host cell can include a eukaryotic cell (e.g., insect, yeast, or mammalian) or a prokaryotic cell (e.g., bacteria). In the context of expressing a heterologous nucleic acid sequence, “host cell” can refer to a prokaryotic cell, and it includes any transformable organism that is capable of replicating a vector and/or expressing a heterologous gene encoded by a vector. A host cell can and has been, used as a recipient for vectors. A host cell may be “transfected” or “transformed,” which refers to a process by which exogenous nucleic acid is transferred or introduced into the host cell. A transformed cell includes the primary subject cell and its progeny.

[0130] In particular embodiments, a host cell is a Gram-negative bacterial cell. These bacteria are suited for use in that they possess a periplasmic space between the inner and outer membrane and, particularly, the aforementioned inner membrane between the periplasm and cytoplasm, which is also known as the cytoplasmic membrane. As such, any other cell with such a periplasmic space could be used. Examples of Gram-negative bacteria include, but are not limited to, E. coli, Pseudomonas aeruginosa, Vibrio cholera, Salmonella typhimurium, Shigella flexneri, Haemophilus influenza, Bordetella pertussi, Erwinia amylovora, Rhizobium sp. The Gram-negative bacterial cell may be still further defined as a bacterial cell which has been transformed with the coding sequence of a fusion polypeptide comprising a candidate binding polypeptide capable of binding a selected ligand. The polypeptide is anchored to the outer face of the cytoplasmic membrane, facing the periplasmic space, and may comprise an antibody coding sequence or another sequence. One means for expression of the polypeptide is by attaching a leader sequence to the polypeptide capable of causing such directing.

[0131] Numerous prokaryotic cell lines and cultures are available for use as a host cell, and they can be obtained through the American Type Culture Collection (ATCC), which is an organization that serves as an archive for living cultures and genetic materials. An appropriate host can be determined by one of skill in the art based on the vector backbone and the desired result. A plasmid or cosmid, for example, can be introduced into a prokaryote host cell for the replication of many vectors. Bacterial cells used as host cells for vector replication and/or expression include DH5-alpha, JM109, and KC8, as well as a number of commercially available bacterial hosts such as SURE™ Competent Cells and SOLOPACK™ Gold Cells (STRATAGENE™, La Jolla). In some aspects, other bacterial cells such as E. coli LE392 are contemplated for use as host cells.

[0132] Many host cells from various cell types and organisms are available and would be known to one of skill in the art. Similarly, a viral vector may be used in conjunction with a prokaryotic host cell, particularly one that is permissive for replication or expression of the vector. Some vectors may employ control sequences that allow it to be replicated and/or expressed in both prokaryotic and eukaryotic cells. One of skill in the art would further understand the conditions under which to incubate all of the above-described host cells to maintain them and to permit replication of a vector. Also understood and known are techniques and conditions that would allow large-scale production of vectors, as well as production of the nucleic acids encoded by vectors and their cognate polypeptides, proteins, or peptides.

[0133] In some aspects, a host cell is mammalian. Examples include CHO cells, CHO-K1 cells, or CHO-S cells. Other mammalian host cells include NS0 cells and CHO cells that are dhfr-, e.g., CHO-dhfr-, DUKX-B11 CHO cells, and DG44 CHO cells.

[0134] Numerous expression systems exist can that comprise at least a part or all of the compositions disclosed herein. Expression systems can include eukaryotic expression systems and prokaryotic expression systems. Such systems could be used, for example, to produce a polypeptide product identified as capable of binding a particular ligand. Prokaryote-based systems can be employed to produce nucleic acid sequences, or their cognate polypeptides, proteins, and peptides. Many such systems are commercially and widely available. Other examples of expression systems comprise of vectors containing a strong prokaryotic promoter such as T7, Tac, Trc, BAD, lambda pL, Tetracycline or Lac promoters, the pET Expression System and an E. coli expression system.

[0135] In some embodiments, vertebrate host cells are used for producing the antibodies of the present disclosure. For example, mammalian cell lines such as a monkey kidney CV1 line transformed by SV40 (COS-7); human embryonic kidney line (293 or 293 cells as described, e.g., in Graham et al., J. Gen Virol. 36:59, 1977; baby hamster kidney cells (BHK); mouse Sertoli cells (TM4 cells as described, e.g., in Mather, Biol. Reprod. 23:243-251, 1980 monkey kidney cells (CV1); African green monkey kidney cells (VERO-76); human cervical carcinoma cells (HELA); canine kidney cells (MDCK; buffalo rat liver cells (BRL 3A); human lung cells (W138); human liver cells (Hep G2); mouse mammary tumor (MMT 060562); TRI cells, as described, e.g., in Mather et al., Annals N.Y. Acad. Sci. 383:44-68, 1982; MRC 5 cells; and FS4 cells may be used to express anti-coronavirus antibodies. Other useful mammalian host cell lines include Chinese hamster ovary (CHO) cells, including DHFR-CHO cells (Urlaub et al., Proc. Natl. Acad. Sci. USA 77:4216, 1980); and myeloma cell lines such as Y0, NS0, and Sp2/0. Host cells of the present disclosure also include, without limitation, isolated cells, in vitro cultured cells, and ex vivo cultured cells. For a review of certain mammalian host cell lines suitable for antibody production, see, e.g., Yazaki and Wu, Methods in Molecular Biology, Vol. 248 (B. K. C. Lo, ed., Humana Press, Totowa, NJ), pp. 255-268, 2003.

[0136] A host cell transfected with an expression vector encoding an anti-SARS-CoV-2 antibody of the present disclosure, or fragment thereof, can be cultured under appropriate conditions to allow expression of the polypeptide to occur. The polypeptides may be secreted and isolated from a mixture of cells and medium containing the polypeptides. Alternatively, the polypeptide may be retained in the cytoplasm or in a membrane fraction and the cells harvested, lysed, and the polypeptide isolated using a desired method.

### Methods

[0137] The methods described herein can include, unless otherwise indicated, conventional methods of protein chemistry, biochemistry, recombinant DNA techniques, and pharmacology, within the skill of the art. Such techniques are explained fully in the literature. See, e.g., T. E. Creighton, Proteins: Structures and Molecular Properties (W.H. Freeman and Company, 1993); A. L. Lehninger, Biochemistry (Worth Publishers, Inc., current addition); Green & Sambrook, et al., Molecular Cloning: A Laboratory Manual (4th Edition, 2012); Methods In Enzymology (S. Colowick and N. Kaplan eds., Academic Press, Inc.); Remington's Pharmaceutical Sciences, 18th Edition (Easton, Pennsylvania: Mack Publishing Company, 1990); Carey and Sundberg Advanced Organic Chemistry 3rd Ed. (Plenum Press) Vols A and B (1992); Current Protocols in Molecular Biology (2002-; Wiley; Online ISBN: 9780471142720; DOI: 10.1002/04711142727); Current Protocols in Immunology (2001-; Wiley; Online ISBN: 9780471142737; DOI: 10.1002/0471142735).

### Methods of Generating Variants

[0138] Methods for producing variants include identifying the heavy and light chain sequences (nucleic acid or amino acid) of naturally occurring antibodies, and introducing mutations therein that result in increased binding to SARS-CoV-2 antigens, enhanced neutralizing activity, improved developability, and/or reduced risk of clinical immunogenicity, as described below.

### Binding Activity

[0139] The activity of antibodies or variants thereof as described herein can be assessed for binding to SARS-CoV-2 antigens, such as the S protein or receptor-binding domain (RBD). Binding can be determined using any assay that measures binding to SARS-CoV-2 antigens, e.g., surface plasmon resonance (SPR) analysis using a biosensor system or bio-layer interferometry (BLI) or enzyme-linked immunosorbent assay (ELISA). Systems suitable for use in SPR are commercially available, for example, LSA™ (Carterra, Dublin, CA), Biacore™ (General Electric, Boston, MA), and OpenSPR (Nicoya, East Kitchener, ON, Canada). Systems suitable for use in BLI include, but are not limited to, Octet™ (ForteBio, Fremont, CA) and Gator™ (Probelife, Palo Alto, CA). In an exemplary SPR assay, each antibody or variant thereof can be either directly immobilized to a Carterra CMD200M Chip or captured to the CMD200M Carterra Chip with a goat anti-human IgG Fc antibody. The uncoupled antibodies can be washed off and various concentration gradients of the targets can be flowed over the antibodies. In some cases, the highest concentration of each target can be in the range of 0.5-8 μg/mL. For better accuracy, each antibody can be immobilized in different locations (e.g., at least 2) on the chip, and the affinity for each antibody-target combination can be determined using multiple (e.g., 4-5) target concentrations according to standard methods. In some cases, if the variation between the two duplicates is >3-fold, the antibody-target measurement is repeated. For BLI, each of the antigens can be immobilized on sensors according to the manufacturer's instructions. In one illustrative example, the antigen can be biotinylated and immobilized to streptavidin sensors. For better accuracy, each antibody can be evaluated in replicates at a suitable concentration (e.g., 5 μg/mL). In some cases, if the variation between the two duplicates is >3-fold, the antibody-target measurement is repeated. The assays are typically performed under conditions according to the manufacturer's instructions. In some cases, the assays are performed under a temperature in the range of 20° C. to 37° C., for example, 20° C.-25° C. In one embodiment, the assay is performed at 25° C. In one embodiment, the assay is performed at 37° C.

[0140] In some embodiments, binding to SARS-CoV-2 antigens is assessed in a competitive assay format with a reference antibody or a reference antibody having the same variable regions. In some embodiments, an antibody or variant thereof may block binding of the reference antibody in a competition assay by about 50% or more.

### Functional Assays

[0141] Antibodies of the present disclosure may also be evaluated in various assays for their ability to mediate FcR-dependent activity. In some embodiments, either plasma or serum obtained from patients potentially infected, or with known infections, of SARS-CoV-2, or an antibody of the present disclosure has enhanced antibody dependent cellular cytotoxicity (ADCC), antibody dependent cellular phagocytosis (ADCP), or complement-dependent cytotoxicity (CDC), or neutralization activity as and/or serum stability compared to a control or reference antibody. when the antibodies are assayed in a human IgG1 isotype format.

[0142] Examples of neutralization assays that employ fully infections SARS-CoV-2 virus include focus-forming assays and plaque-reduction assays. Alternatively, neutralization assays may employ a pseudotyped virus system where a chimeric virus particle is generated by combining plasmids encoding the genetic material for a backbone viral system, such as Vesicular stomatitis virus, with a second plasmid encoding the spike protein that sits on the surface of the virus. Such a “pseudotyped” virus can infect the same cells susceptible to fully infectious SARS-CoV-2 virus but cannot form viral progeny. Breadth and potency are two typical measures that may be employed to characterize an antibody's neutralizing activity. Breadth is the proportion of tested viruses with IC₅₀ scores that fall below an IC₅₀ cutoff value for neutralizing activity. Potency can be calculated using the geometric mean IC₅₀ (see, e.g., Hraber et al., J Virol. 88:12623-43, 2014; Rademeyer).

[0143] In some embodiments, activity of an antibody or variant thereof is evaluated in vivo in an animal model, e.g., as described in the Examples section. In one embodiment, the assay comprises passive transfer/challenge experiments in a Syrian hamster animal model.

[0144] A variant as described herein has at least 50/a, or at least 60%, or 70%, or greater, of neutralizing activity of a reference antibody (e.g., an unmodified antibody or a modified parent antibody) when evaluated under the same assay conditions. In some embodiments, an antibody exhibits increased activity, i.e., greater than 100%, activity compared to a reference antibody. In some embodiments, the antibody or variants disclosed herein have similar activity against SARS-CoV-2 infection as compared to a reference antibody. The term “similar activity,” when used to compare in vivo activity of antibodies, refers to two measurements of the activity which are no more than 30%, no more than 25%, no more than 20%, no more than 15% different, no more than 10%, no more than 8%, or no more than 5% different from each other.

[0145] In some embodiments, the antibody or variant thereof is modified to have improved developability (i.e., reduced development liabilities), including but not limited to, decreased heterogeneity, increased yield, increased stability, improved net charges to improve pharmacokinetics, and or/reduced immunogenicity. In some embodiments, antibodies having improved developability can be obtained by introducing mutations to reduce or eliminate potential development liabilities, as described in Table 6 or Table 7. In some embodiments, antibodies having improved developability possess modifications as compared to a reference or control antibody in their amino acid sequence.

[0146] In some embodiments, the antibodies or variants thereof disclosed herein have improved developability while maintaining comparable or improved binding affinity to the target antigen as compared to a reference or control (unmodified) antibody. In some embodiments, the antibodies or variants thereof disclosed herein have improved developability while maintaining activities that are similar to a reference or control (unmodified) antibody.

[0147] In some embodiments, the antibodies or variants thereof have improved developability, e.g., as identified through various in vitro assays, such as aggregation assessment by HPLC or UPLC, hydrophobic interaction chromatography (HIC), polyspecificity assays (e.g., baculovirus particle binding), self-interaction nanoparticle spectroscopy (SINS), or mass spec analysis after incubation in an accelerated degradation condition such as high temperature, low pH, high pH, or oxidative H₂O₂. Mutations are successful if the activity is maintained (or enhanced) while removing or reducing the severity of the liability.

[0148] Improved properties of antibodies or variants thereof as described herein include: (1) fits a standard platform (expression, purification, formulation); (2) high yield; (3) low heterogeneity (glycosylation, chemical modification, and the like); (4) consistent manufacturability (batch-to-batch, and small-to-large scale); (5) high stability (years in liquid formulation), e.g., minimal chemical degradation, fragmentation, and aggregation; and (6) long PK (in vivo half-life), e.g., no off-target binding, no impairment of Fern recycling, and stable. Antibody liabilities are further described in Table 7.

TABLE 6
Description of potential development liabilities

| | | sequence | |
|---|---|---|---|
| | | comprises an odd | |
| | Yield, heterogeneity, stability, | number of | |
| Free cysteine⁶ | activity | cysteines | High |
| N-linked glycosylation | Yield, heterogeneity, activity | N(~P)(S, T)¹ | High |
| Abnormal net charge | Platform fit, PK | Sharma 2014² | High |
| Patches of hydrophobicity | Stability, PK | Sharma 2014 | High |
| Patches of same charge | Stability, PK | N/A (based on | Medium |
| | | structure) | |
| Proteolysis | Stability, PK | (K, R)(K, R)³ | Medium |
| Proteolysis | Stability, PK | DP | Medium |
| Asparagine deamidation | Heterogeneity, stability, activity | NG; N(A, N, S, T)⁴ | Medium; |
| | | | Low |
| Aspartate isomerization | Heterogeneity, stability, activity | DG; D(A, D, S, T)⁵ | Medium; |
| | | | Low |
| Lysine glycation | Heterogeneity, stability, activity | K | Low |
| Methionine oxidation | Heterogeneity, stability, activity | M | Low |
| Tryptophan oxidation | Heterogeneity, stability, activity | W | Low |

Note:
¹The N-linked glycosylation site is N-X-S/T, where X is any residue other than proline.
²Sharma et al., Proc. Natl. Acad. Sci. USA 111: 18601-18606, 2014
³This motif consists of a K or R, followed by a K or R. Stated differently, the motif can be KK, KR, RK, or RR.

[0149] ⁴The dipeptide NG poses a medium risk of development liability. The dipeptides NA, NN, NS, and NT pose a low risk of development liability. N may also exhibit a low risk of liability for other successor residues, e.g., D, H, or P. Stated differently, dipeptide ND, NH, or NP poses a low risk of development liability.

[0150] ⁵Similarly to the above, the dipeptide DG poses a medium risk of development liability. The dipeptides DA, DD, DS, and DT pose a low risk of development liability. D may also exhibit a low risk of development liability for other successor residues, e.g., N, H, or P.

[0151] ⁶“Free cysteine” refers to a cysteine that does not forma disulfide bond with another cysteine and thus is left “free” as thiols. The presence of free cysteines in the antibody can be a potential development liability. Typically, an odd net number of cysteines in the protein shows a likelihood there is a free cysteine.

[0152] Another goal for engineering variants is to reduce the risk of clinical immunogenicity: the generation of anti-drug antibodies against the therapeutic antibody. To reduce risk, the antibody sequences are evaluated to identify residues that can be engineered to increase similarity to the intended population's native immunoglobulin variable region sequences.

[0153] The factors that drive clinical immunogenicity can be classified into two groups. First are factors that are intrinsic to the drug, such as sequence; post-translational modifications; aggregates; degradation products; and contaminants. Second are factors related to how the drug is used, such as dose level; dose frequency; route of administration; patient immune status; and patient HLA type.

[0154] One approach to engineering a variant to be as much like self as possible is to identify a close germline sequence and mutate as many mismatched positions (also known as “germline deviations”) to the germline residue type as possible. This approach applies for germline genes IGHV, IGHJ, IGKV, IGKJ, IGLV, and IGLJ, and accounts for all the variable heavy (VH) and variable light (VL) regions except for part of H-CDR3. Germline gene IGHD codes for part of the H-CDR3 region but typically exhibits too much variation in how it is recombined with IGHV and IGHJ (e.g., forward, or reverse orientation, any of three translation frames, and 5′ and 3′ modifications and non-templated additions) to present a “self” sequence template from a population perspective.

[0155] Each germline gene can present as different alleles in the population. The least immunogenic drug candidate, in terms of minimizing the percent of patients with an immunogenic response, would likely be one that matches an allele commonly found in the patient population. Single nucleotide polymorphism (SNP) data from the human genome can be used to approximate the frequency of alleles in the population.

[0156] Another approach to engineering a lead for reduced immunogenicity risk is to use in silico predictions of immunogenicity, such as the prediction of T cell epitopes, or use in vitro assays of immunogenicity, such as ex vivo human T cell activation. For example, services such as those offered by Lonza, United Kingdom, are available that employ platforms for the prediction of HLA binding and in vitro assessment to further identify potential epitopes.

[0157] Antibody variants can be designed to enhance the efficacy of the antibody. In some embodiments, design parameters can focus on CDRs, e.g., CDR3. Positions to be mutated can be identified based on structural analysis of antibody-antigen co-crystals (Oyen et al., Proc. Natl. Acad Sci. USA 114:E10438-E10445, 2017; Epub Nov. 14 2017) and based on sequence information of other antibodies from the same lineage.

### Approaches to Mutation Design

[0158] Development liabilities can be removed or reduced by one or more mutations. Mutations are designed to preserve antibody structure and function while removing or reducing development liabilities and to improve function. In some embodiments, mutations to chemically similar residues can be identified that maintain size, shape, charge, and/or polarity. Illustrative mutations are described in Table 7.

TABLE 7
preferred mutations to remove development liabilities

| | | | → |
|---|---|---|---|
| Free cysteine | Odd # C | High | C→(A, S) |
| N-linked glycosylation | N(~P)(S, T) | High | N→(Q, D, S, A); (S, T)→(A, N) |
| Proteolytic cleavage | (K, R)(K, R) | Medium | K, R→(Q, S, A) |
| Proteolytic cleavage | DP | Medium | D→(E, S, A) |
| Asparagine deamidation | NG; N(A, N, S, T)* | Medium; Low | N→(Q, S, A); G→(A, S) |
| Aspartate isomerization | DG; D(A, D, S, T)* | Medium; Low | D→(E, S, A); G→(A, S) |
| Lysine glycation | K | Low | K→(R, Q, S, A) |
| Methionine oxidation | M | Low | M→(Q, L, S, A) |
| Tryptophan oxidation | W | Low | W→(Y, F) |

Note:
the last column of Table 7 shows preferred mutations. For example, C→(A, S) refers to that C can be mutated to either A or S in order to remove development liabilities.

### In Vitro Assays

### Neutralizing Assays

[0159] In some embodiments, in vitro assays can be used to determine if the antibodies described herein produce a neutralizing response to SARS-CoV-2. In some embodiments, an assay using live, or replication-competent virus can be used. In some embodiments, a pseudovirus (PSV) neutralization assay can be used. In some embodiments, the target cells used in the neutralization assays are HeLa cells that express the cell surface receptor ACE2. In some embodiments, the target cells used in the neutralization assays are cells of the Vero E6 cell line.

[0160] In some embodiments, a neutralization assay can be used to determine inhibition of virus infectivity in cell culture in the presence of a single antibody or a combination of antibodies as described herein. In some embodiments, a neutralization assay can also be used to determine inhibition of virus infectivity in cell culture in the presence of serum or plasma from a potentially infected or confirmed infected animal or human.

### Binding Affinity Assays

[0161] In some embodiments, the assay is a Bio-layer interferometry (BLI) assay. An exemplary BLI assay is described in the Examples. In some embodiments, the assay is a Surface Plasmon Resonance (SPR) assay. An exemplary SPR assay is described in the Examples.

### Other In Vitro Assays

[0162] In some embodiments, the assay is an enzyme-linked immunosorbent assay (ELISA) that detects binding of the antibody to a coronavirus antigen, such as a SARS-CoV-2 antigen. One example of a serological ELISA is described in Amanat, F. et al., A serological assay to detect SARS-CoV-2 seroconversion in humans (doi.org/10.1101/2020.03.17.20037713). Another example is described in Krammer, F. and Simon, V., Serology assays to manage COVID-19, Science, Published Online, 15 May 2020 (DOI: 10.1126/science.abc1227).

[0163] In some embodiments, a lateral flow assay can be used to detect antibodies described herein in bodily fluids derived from a subject, such as blood serum or plasma. In some embodiments, the assay is a Western-blot assay.

[0164] In some embodiments, the assay is a transcytosis assay to determine IgG trafficking in vitro. Examples of suitable transcytosis assays are described in Claudia A. Castro Jaramillo, et al. (2017) Toward in vitro-to-in vivo translation of monoclonal antibody pharmacokinetics: Application of a neonatal Fc receptor-mediated transcytosis assay to understand the interplaying clearance mechanisms, mAbs, 9:5, 781-791, DOI: 10.1080/19420862.2017.1320008; and Chung S, Nguyen V, Lin Y. L., et al., An in vitro FcRn-dependent transcytosis assay as a screening tool for predictive assessment of nonspecific clearance of antibody therapeutics in humans. MAbs. 2019; 11(5):942-955. doi:10.1080/19420862.2019.1605270.

### T Cell Assays

[0165] Other assays include determining T cell responses to infection by SARS-CoV-2. Such assays include determining CD4⁺ and CD8⁺ T cell responses. One assay for determining CD4⁺ T cell responses is a T cell receptor- (TCR) dependent Activation Induced Marker (AIM) assay, which allow for allows quantification of SARS-CoV-2-specific CD4⁺ T cells in subjects who were exposed to SARS-CoV-2 or who recovered from COVID-19. Markers for CD4⁺ T cells include OX40 and CD137. Assays for determining CD8⁺ T cell responses include AIM assays and intracellular cytokine staining (ICS). Markers for CD8⁺ T cells include CD69 and CD137. The expression of cytokines such as IFNγ, granzyme B, and TNF can be used for ICS.

### In Vivo Assays

[0166] In some embodiments, in vivo assays can be used to determine if the antibodies described herein produce a neutralizing response to SARS-CoV-2. In one embodiment, the in vivo assay comprises passive transfer/challenge experiments in a Syrian hamster animal model, as described in the Examples. In other embodiments, transgenic mice expressing the human ACE2 receptor, or non-human primates, can be used. Assays describing all three models are described in the Examples.

Methods of Producing or Generating Antibodies that Bind SARS-CoV-2

[0167] The antibodies described herein can be produced using multiple different technologies, such as 1) isolation of antibodies of interest from B cells of a subject that mounted an immune response to the virus; and 2) isolation of antibodies derived from expression libraries of immunoglobulin molecules, or derivatives thereof, expressed heterologously and screened using one or more display technologies (reviewed in Hoogenboom H R, Trends Biotechnol., 1997, 15:62-70; Hammond P W, MAbs, 2010, 2:157-64; Nissim A, Chemajovsky Y, Handb Exp Pharmacol., 2008, (181):3-18; Steinitz M, Hum Antibodies, 2009; 18:1-10; Bradbury A R, Sidhu S, Dübel S, and McCafferty, Nat Biotechnol., 2011, 29:245-54; Antibody Engineering (Kontermann R E and Dübel S eds., Springer, 2nd edition)).

[0168] In some embodiments, peripheral blood mononuclear cells (PBMC) can be isolated from human subjects that are acutely infected with SARS-CoV-2 or have symptoms consistent with COVID-19, or are asymptomatic, but have had known contact with a SARS-CoV-2 infected individual. An appropriate test, such as a PCR test using a sample from a nasopharyngeal swab, can be used to confirm the subject is infected with SARS-CoV-2. To determine if a donor was infected with SARS-CoV-2, donor plasma or serum can be tested for IgM, IgG or IgA antibodies that bind to specific SARS-CoV-2 antigens. The antigens included in this assay could be any of the structural and non-structural proteins expressed by any of the SARS-CoV-2 open reading frames (ORFs). Alternatively, donor plasma or sera can be tested in neutralization assays using to pseudovirus expressing SARS-CoV-2 spike protein or full-length, infectious SARS-CoV-2 Binding to antigens from closely related viruses, such as SARS-CoV-1, may also be tested.

[0169] Peripheral blood mononuclear cells (PBMC) isolated from either acutely infected or previously infected subjects can be sorted for B cells using B cell markers by FACS and/or SARS-CoV-2 antigens as bait. In some embodiments, PBMCs isolated from either acutely infected or previously infected subjects will be stained with propidium iodide as a live/dead marker in addition to a panel of antibodies including CD3, CD14, IgM, IgA and IgD, CD19, CD20, CD27 and CD38. Cells that are CD19-, CD20⁺, CD27, CD38⁺ are initially selected. The sub-population of cells that are negative for CD3, CD14, IgM, IgA and IgD are considered plasmablasts.

### Methods for Inducing a Prophylactic Immune Response

[0170] In one aspect, methods for inducing an in vivo immune response in a subject at risk of SARS-CoV-2 infection, or a subject potentially exposed to another person infected with SARS-Cov-2, following administration of a prophylactic antibody are provided. In some embodiments, the method comprises administering an antibody described herein to the subject and detecting an immune response. In some embodiments of the method, the antibody is administered intravenously. In some embodiments, the successful administration of antibody can be evaluated by testing if the serum or plasma from the donor binds to SARS-CoV-2 antigens in an ELISA or other binding assay. In some embodiments, the plasma or serum from the subject could also be tested for functional activity, including antibody-dependent cellular cytotoxicity (ADCC), antibody-dependent cellular phagocytosis (ADCP), and/or complement-dependent cytotoxicity (CDC) or antibody-mediated virus neutralization. In some embodiments, the immune response results in protection from infection for a specific period of time following administration of the antibody described herein.

### Methods for Inducing a Therapeutic Immune Response

[0171] In another aspect, methods for inducing an in vivo immune response in a subject infected with SARS-CoV-2 following administration of a therapeutic antibody are provided. In some embodiments, the method comprises administering an antibody described herein to the subject and detecting an immune response. In some embodiments of the method, the antibody is administered intravenously. In some embodiments, the successful administration of antibodies is evaluated by testing if the serum or plasma from the donor binds to SARS-CoV-2 antigens in an ELISA or other binding assay. In some embodiments, the plasma or serum from the subject is also tested for functional activity, including antibody-dependent cellular cytotoxicity (ADCC), antibody-dependent cellular phagocytosis (ADCP), and/or complement-dependent cytotoxicity (CDC) or antibody-mediated virus neutralization. In some embodiments, the immune response is measured by the amount of time to clinical improvement as defined by discharge from hospital, or reduction in 2 points on a 6-point scale, where 1 is sufficiently healthy for discharge, and 6 is death. In some embodiments, the immune response is measured by seroconversion from positive SARS-CoV-2 RT-qPCR test to negative SARS-CoV-2 RT-qPCR test within a specific number of hours. In some embodiments, the total number of hours by which to quantify seroconversion is approximately 72 hours (see Li L, Zhang W, Hu Y, et al., Effect of Convalescent Plasma Therapy on Time to Clinical Improvement in Patients with Severe and Life-threatening COVID-19: A Randomized Clinical Trial. JAMA Published online Jun. 3, 2020, doi: 10.1001/jama.2020.10044). In some embodiments, the immune response is measured by the absolute reduction in viral load or the percent reduction in viral load from treatment initiation to treatment cessation. In some embodiments, the immune is quantified by whether the patient required supplemental oxygen therapy, including mechanical ventilation or the duration of mechanical ventilation or supplemental oxygen therapy (see Wang, Y., et al., Remdesivir in adults with severe COVID-19: a randomised, double-blind, placebo-controlled, multicentre trial. The Lancet, Vol. 395; pages 1569-1578, May 16, 2020).

### Methods of Treatment

[0172] In another aspect, a method for treating or preventing one or more symptoms of COVID-19 in a subject is provided, the method comprising administering to the subject a therapeutically effective amount of an antibody as disclosed herein, or a pharmaceutical composition comprising the antibody. In certain embodiments, an antibody described herein is administered to the subject in combination with one or more additional therapeutic agents used to treat a viral infection or the side effects or associated symptoms thereof. In certain embodiments, the method comprises administering to a subject a therapeutically effective amount of an antibody as disclosed herein, or a pharmaceutical composition comprising the antibody, in combination with a therapeutically effective amount of one or more additional therapeutic agents. In one embodiment, a method for treating COVID-19 in a human having or at risk of having an infection by SARS-CoV-2 is described, the method comprising administering to the human a therapeutically effective amount of an antibody as disclosed herein, or a pharmaceutical composition comprising the antibody, in combination with a therapeutically effective amount of one or more additional therapeutic agents.

[0173] Symptoms of Covid-19 include fever or chills, cough, shortness of breath (dyspnea), fatigue, muscle or body aches, headache, sore throat, a new loss of taste or smell, congestion or runny nose, nausea, vomiting, diarrhea, inflammation of the skin, confusion, eye symptoms such as enlarged blood vessels, swollen eyelids, excessive watering and increased discharge, light sensitivity and irritation, and neurological complications such as delirium, brain inflammation, stroke, and nerve damage. Symptoms may appear two to 14 days after exposure to SARS-CoV-2.

[0174] In some embodiments, one or more additional therapeutic agents comprise an antibody that binds to SARS-CoV-2. In some embodiments, the antibody that binds to SARS-CoV-2 is casirivimab (Regeneron Pharmaceuticals), imdevimab (Regeneron Pharmaceuticals), etesevima (Eli Lilly and Company), bamlanivimab (Eli Lilly and Company), CT-P59 (Celltrion Healthcare), BRII-196 (Brii Biosciences), BRII-198 (Brii Biosciences), VIR-7831 (Vir Biotechnology), AZD7442 (AstraZeneca), AZD8895 (AstraZeneca), AZD1061 (AstraZeneca), TY027 (Tychan Pte. Ltd.), SCTA01 (Sinocelltech Ltd.), MW33 (Mabwell Bioscience Co., Ltd.), JS016 (Junshi Biosciences), DXP593 (Singlomics/Beigene), DXP604 (Singlomics/Beigene), STI-2020 (Sorrento Therapeutics), BI 767551/DZIF-10c (U. Cologne/Boehringer Ingelheim), COR-101 (CORAT Therapeutics), HLX70 (Hengenix Biotech), ADM03820 (Ology Bioservices), HFB30132A (HiFiBiO Therapeutics), ABBV-47D11 (AbbVie), C144-LS (Bristol-Myers Squibb, Rockefeller University), C-135-LS (Bristol-Myers Squibb, Rockefeller University), LY-CovMab (Luye Pharma), JMB2002 (Jemincare), or ADG20 (Adagio Therapeutics), or combinations thereof. In some embodiments, an antibody of the present disclosure as described herein is combined with at least one of casirivimab (Regeneron Pharmaceuticals), imdevimab (Regeneron Pharmaceuticals), etesevima (Eli Lilly and Company), bamlanivimab (Eli Lilly and Company), CT-P59 (Celltrion Healthcare), BRII-196 (Brii Biosciences), BRII-198 (Brii Biosciences), VIR-7831 (Vir Biotechnology), AZD7442 (AstraZeneca), AZD8895 (AstraZeneca), AZD1061 (AstraZeneca), TY027 (Tychan Pte. Ltd.), SCTA01 (Sinocelltech Ltd.), MW33 (Mabwell Bioscience Co., Ltd.), JS016 (Junshi Biosciences), DXP593 (Singlomics/Beigene), DXP604 (Singlomics/Beigene), STI-2020 (Sorrento Therapeutics), BI 767551/DZIF-10c (U. Cologne/Boehringer Ingelheim), COR-101 (CORAT Therapeutics), HLX70 (Hengenix Biotech), ADM03820 (Ology Bioservices), HFB30132A (HiFiBiO Therapeutics), ABBV-47D11 (AbbVie), C144-LS (Bristol-Myers Squibb, Rockefeller University), C-135-LS (Bristol-Myers Squibb, Rockefeller University), LY-CovMab (Luye Pharma), JMB2002 (Jemincare), or ADG20 (Adagio Therapeutics). In some embodiments, an antibody of the present disclosure as described herein is combined with at least one of casirivimab (Regeneron Pharmaceuticals), imdevimab (Regeneron Pharmaceuticals), etesevima (Eli Lilly and Company), or bamlanivimab (Eli Lilly and Company), or combinations thereof.

[0175] In some embodiments, one or more additional therapeutic agents comprise antiviral drugs. In some embodiments, the one or more additional therapeutic agents comprise the antiviral drug molnupiravir (MK-4482/EIDD-2801). In some embodiments, one or more additional therapeutic agents comprise the antiviral drug remdesivir (GS-5734™). Molnupiravir is an investigational, orally administered form of a potent ribonucleoside analog that inhibits the replication of SARS-CoV-2. Remdesivir has demonstrated in vitro and in vivo activity in animal models against the viral pathogens that cause MERS and SARS, which are coronaviruses structurally similar to SARS-CoV-2.

[0176] Examples of additional therapeutic agents that may be useful for treating COVID-19 are shown below (see the internet at www.drugs.com/condition/covid-19.html)

[0177] Baricitinib: a Janus kinase (JAK) inhibitor (marketed under the brand name Olumiant for the treatment of rheumatoid arthritis).

[0178] Bemcentinib: An AXL kinase inhibitor. Bemcentinib has been reported to exhibit potent antiviral activity in preclinical models against several enveloped viruses, including Ebola and Zika virus, and recent data have expanded this to include SARS-CoV-2.

[0179] Bevacizumab. A VEGF inhibitor (marketed under the brand name Avastin for certain types of cancer) is being studied as a treatment for acute lung injury (ALI) and acute respiratory distress syndrome (ARDS) in critically ill patients with COVID-19 pneumonia.

[0180] Chloroquine phosphate. An anti-malaria drug that has been shown to have a wide range of antiviral effects, including anti-coronavirus. Studies in Guangdong Province in China suggest that chloroquine may help improve patient outcomes in people with novel coronavirus pneumonia.

[0181] Colchicine. An anti-inflammatory drug being studied to prevent complications of COVID-19 in high risk patients. Colchicine has long been used in the treatment of gout.

[0182] EIDD-2801. A broad-spectrum oral antiviral that could be used as a potential prophylactic or treatment for COVID-19 and other coronaviruses.

[0183] Favipiravir. An antiviral drug approved in some countries for the treatment of influenza, was also approved for use in clinical trials as a treatment for novel coronavirus pneumonia.

[0184] Fingolimod. An approved drug called fingolimod (marketed under the brand name Gilenya for the treatment of relapsing forms of multiple sclerosis) is being studied as a treatment for COVID-19.

[0185] Hydroxychloroquine and azithromycin. the anti-malaria drug hydroxychloroquine and the macrolide antibacterial drug azithromycin (Zithromax) are currently in clinical trials in the U.S.

[0186] Hydroxychloroquine sulfate. a malaria drug was shown to be effective in killing the coronavirus in laboratory experiments. Hydroxychloroquine was first approved by the FDA in 1995 under the brand name Plaquenil, and it is also used in the treatment of patients with lupus and arthritis. In March 2020, the US FDA issued an emergency use authorization (EUA) to allow the emergency use of hydroxychloroquine sulfate supplied from the Strategic National Stockpile (SNS) for the treatment of COVID-19 in certain hospitalized patients.

[0187] Ivermectin. An anti-parasitic drug was shown to be effective against the SARS-CoV-2 virus in an in-vitro laboratory study. Further clinical trials need to be completed to confirm the effectiveness of the drug in humans with COVID-19.

[0188] Leronlimab. A CCR5 antagonist has shown promise in reducing the “cytokine storm” in a small number of critically ill COVID-19 patients hospitalized in the New York area.

[0189] Lopinavir and ritonavir. A drug combination called lopinavir/ritonavir is approved to treat HIV under the brand name Kaletra. Currently being studied in combination with the flu drug oseltamivir (Tamiflu) in Thailand.

[0190] Methylprednisolone. A widely used glucocorticoid is being studied for safety and effectiveness in the treatment of novel coronavirus pneumonia in several hospitals in the Hubei province of China.

[0191] Sarilumab. An interleukin-6 (IL-6) receptor antagonist (marketed under the brand name Kevzara for the treatment of rheumatoid arthritis) is being studied as a potential treatment for acute respiratory distress syndrome (ARDS) in patients critically ill from COVID-19.

[0192] Tocilizumab. An interleukin-6 receptor antagonist (marketed under the brand name Actemra for the treatment of rheumatoid arthritis and other inflammatory conditions) is being studied in a number of locations worldwide for the treatment of patients with COVID-19.

[0193] Umifenovir. An antiviral drug (marketed in Russia under the brand name Arbidol, and also available in China for the treatment of influenza) is being studied in China and other countries as a treatment for COVID-19.

[0194] In certain embodiments, when an antibody of the present disclosure as described herein is combined with one or more additional therapeutic agents as described above, the components of the composition are administered as a simultaneous or sequential regimen. When administered sequentially, the combination may be administered in two or more administrations.

[0195] In some embodiments, an antibody as disclosed herein is combined with one or more additional therapeutic agents in a unitary dosage form for simultaneous administration to a patient.

[0196] A “patient” refers to any subject receiving the antibody regardless of whether they have COVID-19. In some embodiments, a “patient” is a non-human subject, e.g., an animal that is used as a model of evaluating the effects of antibody administration.

[0197] “Co-administration” of an antibody as disclosed herein with one or more additional therapeutic agents generally refers to simultaneous or sequential administration of an antibody or fragment thereof disclosed herein and one or more additional therapeutic agents, such that therapeutically effective amounts of the antibody or fragment thereof disclosed herein and one or more additional therapeutic agents are both present in the body of the patient.

[0198] Co-administration includes administration of unit dosages of the antibody disclosed herein before or after administration of unit dosages of one or more additional therapeutic agents, for example, administration of the antibody within seconds, minutes, or hours of the administration of one or more additional therapeutic agents. For example, in some embodiments, a unit dose of an antibody disclosed herein is administered first, followed within seconds or minutes by administration of a unit dose of one or more additional therapeutic agents. Alternatively, in other embodiments, a unit dose of one or more additional therapeutic agents is administered first, followed by the administration of a unit dose of an antibody within seconds or minutes. In some embodiments, a unit dose of an antibody disclosed herein is administered first, followed, after a period of hours (e.g., 1-12 hours), by administration of a unit dose of one or more additional therapeutic agents. In other embodiments, a unit dose of one or more additional therapeutic agents is administered first, followed, after a period of hours (e.g., 1-12 hours), by administration of a unit dose of the antibody.

[0199] The combined administration may be co-administration, using separate pharmaceutical compositions or a single pharmaceutical composition, or consecutive administration in either order, wherein there is optionally a time period while both (or all) therapeutic agents simultaneously exert their biological activities. Such combined therapy may result in a synergistic therapeutic effect. In certain embodiments, it is desirable to combine administration of an antibody of the invention with another antibody directed against another Plasmodium falciparum: antigen, or against a different SARS-CoV-2 target epitope.

[0200] As described herein, the antibody may also be administered by gene therapy via a nucleic acid comprising one or more polynucleotides encoding the antibody. In certain embodiments, the polynucleotide encodes an scFv. In particular embodiments, the polynucleotide comprises DNA, cDNA or RNA. In certain embodiments, the polynucleotide is present in a vector, e.g., a viral vector. In one embodiment, the antibody is administered via in vitro-transcribed (IVT) mRNA to express the antibody. See US20190309067, at Examples 12-14, hereby incorporated by reference.

### Methods of Preventing Infection

[0201] In another aspect, a method for preventing infection by SARS-CoV-2 in a subject is provided, the method comprising administering to the subject an antibody described herein, or a pharmaceutical composition comprising the antibody, wherein the antibody or pharmaceutical composition is administered at a dose sufficient to prevent or reduce infection of one or more host cells in the subject by SARS-CoV-2.

[0202] In some embodiments, the antibody or pharmaceutical composition is administered to the subject in combination with one or more additional therapeutic agents that are effective at preventing infection of host cells by SARS-CoV-2. In some embodiments, the one or more additional therapeutic agents that are effective at preventing infection of host cells by SARS-CoV-2 comprise an antibody that binds to SARS-CoV-2. In some embodiments, the antibody that binds to SARS-CoV-2 is casirivimab (Regeneron Pharmaceuticals), imdevimab (Regeneron Pharmaceuticals), etesevima (Eli Lilly and Company), bamlanivimab (Eli Lilly and Company), CT-P59 (Celltrion Healthcare), BRII-196 (Brii Biosciences), BRII-198 (Brii Biosciences), VIR-7831 (Vir Biotechnology), AZD7442 (AstraZeneca), AZD8895 (AstraZeneca), AZD1061 (AstraZeneca), TY027 (Tychan Pte. Ltd.), SCTA01 (Sinocelltech Ltd.), MW33 (Mabwell Bioscience Co., Ltd.), JS016 (Junshi Biosciences), DXP593 (Singlomics/Beigene), DXP604 (Singlomics/Beigene), STI-2020 (Sorrento Therapeutics), BI 767551/DZIF-10c (U. Cologne/Boehringer Ingelheim), COR-101 (CORAT Therapeutics), HLX70 (Hengenix Biotech), ADM03820 (Ology Bioservices), HFB30132A (HiFiBiO Therapeutics), ABBV-47D11 (AbbVie), C144-LS (Bristol-Myers Squibb, Rockefeller University), C-135-LS (Bristol-Myers Squibb, Rockefeller University), LY-CovMab (Luye Pharma), JMB2002 (Jemincare), or ADG20 (Adagio Therapeutics). In some embodiments, an antibody of the present disclosure as described herein is combined with at least one of casirivimab (Regeneron Pharmaceuticals), imdevimab (Regeneron Pharmaceuticals), etesevima (Eli Lilly and Company), bamlanivimab (Eli Lilly and Company), CT-P59 (Celltrion Healthcare), BRII-196 (Brii Biosciences), BRII-198 (Brii Biosciences), VIR-7831 (Vir Biotechnology), AZD7442 (AstraZeneca), AZD8895 (AstraZeneca), AZD1061 (AstraZeneca), TY027 (Tychan Pte. Ltd.), SCTA01 (Sinocelltech Ltd.), MW33 (Mabwell Bioscience Co., Ltd.), JS016 (Junshi Biosciences), DXP593 (Singlomics/Beigene), DXP604 (Singlomics/Beigene), STI-2020 (Sorrento Therapeutics), BI 767551/DZIF-10c (U. Cologne/Boehringer Ingelheim), COR-101 (CORAT Therapeutics), HLX70 (Hengenix Biotech), ADM03820 (Ology Bioservices), HFB30132A (HiFiBiO Therapeutics), ABBV-47D11 (AbbVie), C144-LS (Bristol-Myers Squibb, Rockefeller University), C-135-LS (Bristol-Myers Squibb, Rockefeller University), LY-CovMab (Luye Pharma), JMB2002 (Jemincare), or ADG20 (Adagio Therapeutics). In some embodiments, an antibody of the present disclosure as described herein is combined with at least one of casirivimab (Regeneron Pharmaceuticals), imdevimab (Regeneron Pharmaceuticals), etesevima (Eli Lilly and Company), or bamlanivimab (Eli Lilly and Company).

[0203] In some embodiments, the one or more additional therapeutic agents that are effective at preventing infection of host cells by SARS-CoV-2 comprise antiviral drugs, such as remdesivir (GS-5734™). In some embodiments, the one or more additional therapeutic agents that are effective at preventing infection of host cells by SARS-CoV-2 comprise baricitinib, bemcentinib, bevacizumab, chloroquine phosphate, colchicine, EIDD-2801, favipiravir, fingolimod, hydroxychloroquine and azithromycin, hydroxychloroquine sulfate, ivermectin, leronlimab, lopinavir and ritonavir, methylprednisolone, sarilumab, tocilizumab, or umifenovir, or combinations thereof.

[0204] In one embodiment, the subject has not responded to treatment with a SARS-CoV-2 vaccination regimen. In one embodiment, the subject is not eligible for treatment with a SARS-CoV-2 vaccination regimen. In one embodiment, the subject is not likely to respond to treatment with a SARS-CoV-2 vaccination regimen, such as an elderly subject (a subject who is 65 years of age or older) or a subject with altered immunocompetence.

### Diagnostics

[0205] The antibodies described herein can also be used to detect viral antigens in a biological sample isolated from a subject, and therefore can be useful for diagnosing infection by SARS-CoV-2 in a subject. The sample can be, for example, blood, plasma, or serum. The antibodies described herein can also be used as biomarkers for monitoring the response to treatment of COVID-19 or for determining whether a patient will respond to a particular therapy. Thus, in another embodiment, a method of diagnosing a patient that is or was infected with a coronavirus is described, the method comprising detecting binding of an antibody described herein to a sample obtained from the patient, wherein binding greater than a negative control value indicates the patient is infected with the coronavirus. In some embodiments, the method is an in vitro method, such that detecting binding of an antibody described herein to a sample obtained from the patient is performed in vitro. It will be understood that in vitro methods are not the same as methods performed on an animal or human subject.

[0206] In another aspect, a method of identifying a patient that is infected with a coronavirus is described, the method comprising detecting binding of an antibody described herein to a sample obtained from the patient, wherein binding greater than a negative control value indicates the patient is infected with the coronavirus. In some embodiments, the method comprises testing a patient sample for binding to an antibody described herein and detecting binding of the antibody to components of the sample. Detecting binding of the antibody can be performed, for example, by a serological assay, including enzyme-linked immunosorbent assays (ELISAs), lateral flow assays, or Western blot-based assays. In some embodiments, the sample is a blood, plasma, or serum sample.

### B Cells

[0207] In some embodiments, samples described herein comprise immune cells. The immune cells can be B cells. B-cells include, for example, activated B cells, blasting B cells, plasma cells, plasmablasts, memory B cells, B1 cells, B2 cells, marginal zone B cells, and follicular B cells.

[0208] In general, a “B cell” refers to any cell that has at least one rearranged immunoglobulin gene locus. A B cell can include at least one rearranged immunoglobulin heavy chain locus or at least one rearranged immunoglobulin light chain locus. A B cell can include at least one rearranged immunoglobulin heavy chain locus and at least one rearranged immunoglobulin light chain locus. B cells are lymphocytes that are part of the adaptive immune system. B cells can include any cells that express antibodies either in the membrane-bound form as the B-cell receptor (BCR) on the cell surface or as secreted antibodies. B cells can express immunoglobulins (antibodies, B cell receptor). Antibodies can include heterodimers formed from the heavy and light immunoglobulin chains. The heavy chain is formed from gene rearrangements of the variable, diversity, and junctional (VDJ) genes to form the variable region, which is joined to the constant region. The light chain is formed from gene rearrangements of the variable and junctional (VJ) genes to form the variable region, which is then joined to the constant region. Owing to a large possible number of junctional combinations, the variable regions of the antibody gene (which is also the BCR) have huge diversity, enabling B cells to recognize any foreign antigen and mount a response against it.

### B-Cell Activation and Differentiation

[0209] B cells are activated and differentiate when they recognize an antigen in the context of an inflammatory immune response. They usually include 2 signals to become activated, one signal delivered through BCR (a membrane-bound form of the rearranged immunoglobulin), and another delivered through CD40 or another co-stimulatory molecule. This second signal can be provided through interaction with helper T cells, which express the ligand for CD40 (CD40L) on their surface. B cells then proliferate and may undergo somatic hypermutation, where random changes in the nucleotide sequences of the antibody genes are made, and B cells whose antibodies have higher affinity B cells are selected. They may also undergo “class-switching”, in which the constant region of the heavy chain encoding the IgM isotype is switched to the constant region encoding the IgG, IgA, or IgE isotype. Differentiating B cells may end up as memory B cells, which are usually of higher affinity and class-switched, though some memory B cells are still of the IgM isotype. Memory B cells can also become activated and differentiate into plasmablasts and ultimately, into plasma cells. Differentiating B cells may also first become plasmablasts, which then differentiate to become plasma cells.

### Affinity Maturation and Clonal Families

[0210] A clonal family is generally defined using related immunoglobulin heavy chain and/or light chain V(D)J sequences by 2 or more antibodies or B-cell receptors. Related immunoglobulin heavy chain V(D)J sequences can be identified by their shared usage of V(D)J gene segments encoded in the genome. Within a clonal family there are generally subfamilies that vary based on shared mutations within their V(D)J segments, that can arise during B cell gene recombination and somatic hypermutation.

[0211] Activated B cells migrate and form germinal centers within lymphoid or other tissues, where they undergo affinity maturation. B cells may also undergo affinity maturation outside of germinal centers. During affinity maturation, B cells undergo random mutations in their antibody genes, concentrated in the complementary determining regions (CDRs) of the genes, which encode the parts of the antibody that directly bind to and recognize the target antigen against which the B cell was activated. This creates sub-clones from the original proliferating B cell that express immunoglobulins that are slightly different from the original clone and from each other. Clones compete for antigen and the higher-affinity clones are selected, while the lower-affinity clones die by apoptosis. This process results in the “affinity maturation” of B cells and consequently in the generation of B cells expressing immunoglobulins that bind to the antigen with higher affinity. All of the B cells that originate from the same ‘parent’ B cell form clonal families, and these clonal families include B cells that recognize the same or similar antigenic epitopes. In some aspects, we expect that clones present at higher frequencies represent clones that bind to antigen with higher affinity because the highest-affinity clones are selected during affinity maturation. In some aspects, clones with different V(D)J segment usage exhibit different binding characteristics. In some aspects, clones with the same V(D)J segment usage but different mutations exhibit different binding characteristics.

### Memory B Cells

[0212] Memory B cells are usually affinity-matured B cells and may be class-switched. These are cells that can respond more rapidly to a subsequent antigenic challenge, significantly reducing the time included for affinity-matured antibody secretion against the antigen from ˜14 days in a naive organism to ˜7 days.

### Plasmablasts and Plasma Cells

[0213] Plasma cells can be either long-lived or short-lived. Long-lived plasma cells may survive for the lifetime of the organism, whereas short-lived plasma cells can last for 3-4 days. Long-lived plasma cells reside either in areas of inflammation, in the mucosal areas (in the case of IgA-secreting plasma cells), in secondary lymphoid tissues (such as the spleen or lymph nodes), or in the bone marrow. To reach these divergent areas, plasmablasts fated to become long-lived plasma cells may first travel through the bloodstream before utilizing various chemokine gradients to traffic to the appropriate areas. Plasmablasts are cells that are affinity matured, are typically classed-switched, and usually secrete antibodies, though generally in lower quantities than the quantity of antibody produced by plasma cells. Plasma cells are dedicated antibody secretors.

[0214] Following either vaccination or infection, naïve or memory B cells enter germinal centers and are exposed to antigen. Following appropriate antigen presentation, a specific B cell subset, plasmablasts, are released into the blood and are responsible for making large amounts of antigen-specific antibodies. As an infection progresses, memory B cells re-enter germinal centers and undergo somatic hypermutation, a process which increases the affinity of a given B cell for the antigen of interest. Thus, the plasmablast population reflects not only the naïve B cell response to a given pathogen, but also maturation of the B cell response to that pathogen in real time. Other B cell sorting techniques rely on bait-based selection methods to identify the extremely rare pathogen-specific, circulating memory B cell populations. Such bait-based selection methods bias the selected B cells for those that bind most strongly to the bait and exclude antibodies that either target different antigens/epitopes altogether or bind to conformationally-specific epitopes not formed when the bait is recombinantly expressed. During an acute infection or following vaccination, the plasmablast population can comprise up to 47% of the peripheral B cell population (Wrammert et al, 2012), making them ideal candidates to interrogate using an agnostic sorting strategy. Thus, plasmablasts represent a good source of antibodies that bind SARS-CoV-2 antigens.

### EXAMPLES

### Example 1

[0215] This example describes isolating plasmablast cell populations from peripheral blood mononuclear cells (PBMCs) from human subjects actively infected with SARS-CoV-2.

[0216] PBMCs will be stained with propidium iodide as a live/dead marker in addition to a panel of antibodies including CD3, CD14, IgM, IgA and IgD, CD19, CD20, CD27, and CD38. Cells that are CD19⁺, CD20-, CD27⁺, CD38⁺ are initially selected. The sub-population of cells that are negative for CD3, CD14, IgM, IgA, and IgD are considered “IgG⁺ plasmablasts” and will be single-cell sorted into 384 well plates containing lysis buffer (FIG. 2). To ensure broad coverage of the pathogen-specific antibody repertoire, sequences will be generated from ˜500 PBs per patient sample. mRNA from sorted plasmablasts will be reverse transcribed into cDNA using the protocols below.

### Example 2

[0217] This example describes methods for generating high-quality, paired heavy and light chain sequences.

[0218] Following production of cDNA, high-quality, paired heavy and light chain sequences were generated. In brief, cDNA samples were thawed, pooled, and amplified using a nested PCR reaction. PCR products were sequenced using Illumina® next-generation sequencing technology and processed with the IRC™ bioinformatics pipeline, resulting in the generation of variable heavy and light chain sequences. Barcodes employed early in the amplification process facilitated the pairing of native variable heavy and light chain sequences and allowed for the generation of error-corrected sequences with 99.998% accuracy. See PCT/US2012/000221 (corresponding to US 2015/0133317) and PCT/US2014/072898 (corresponding to US 2015/0329891), which are incorporated by reference herein. Thus, the end product was a highly accurate, natively paired variable heavy and light chain sequences that included the signal sequence peptide on the 5′ end and extended through part of the constant region at the 3′ end, allowing for accurate identification of each antibody's subclass (See DeFalco et al., 2018).

[0219] Each paired set of sequences was analyzed using an Atreca-generated informatics platform and assigned to a specific lineage. Two sequences that originated from the same donor, used the same putative germline heavy and light variable (V) and joining (J) genes, have H-CDR3 and L-CDR3 sequences of the same length and that had at least 75% nucleotide sequence identity in the H-CDR3 and L-CDR3 regions were grouped together into lineages. Phylogenetic trees incorporating these sequence and lineage-specific data were constructed for each donor using rapidNJ software.

### Example 3

[0220] This example describes methods for sequence characterization and selection.

[0221] Using the methods described in Example 2, 17,704 paired heavy and light chain sequences were generated from 4 donors who were infected with SARS-CoV-2. The selection procedures defined below identified 235 of the 17,704 paired sequences for expression as human IgG1 antibodies.
[0222] 1) Lineage abundance—Lineages containing the largest number of plasmablast-derived sequences were selected from each donor, and one representative sequence was selected per lineage.
[0223] 2) Lineage persistence—Lineages that were observed in multiple samples obtained at different timepoints were selected, one representative sequence per lineage.
[0224] 3) Convergence—Antibodies were determined to be convergent in this disclosure if their H-CDR3 and L-CDR3 are of comparable length and have a similar sequence in this application. Convergent antibodies identified herein include those having two or more sequences that originated from different donors or one or more sequences from the Atreca set (i.e., a set of antibodies including any of the antibodies disclosed in this application) and a sequence reported in the literature that originated from the same or similar germline genes. A representative sequence was selected from pairs or groups of convergent sequences.
[0225] 4) Unique sequence features: Sequences that exhibited long H-CDR3 lengths and/or multiple cysteine residues in H-CDR3 were selected in this category.

[0226] Using these methods, the 235 paired sequences were selected and expressed as hIgG1 as described in Example 4. Of the 235 Abs expressed, 227 generated sufficient material for testing in binding and neutralization assays as described in Example 5 and as specified in Tables 1-3.

### Example 4

[0227] This example describes methods for producing antibodies.

[0228] After sequences were selected, gene fragments were synthesized and cloned into human variable heavy (VH) or variable light (VL) chain expression vectors. Fully human, IgG1 antibodies were expressed using a 293F transfection system and purified using high-throughput Protein A columns in sufficient quantities (≥250 μg) to be tested in downstream binding and neutralization assays.

### Example 5

[0229] This example describes methods for identifying antibodies that bind to SARS-CoV-2 antigens. Antibodies were screened for binding to 6 antigens: Envelope (E), Nucleocapsid (N), the native Spike (S) trimer and subunits of the monomeric form of the Spike protein, including the S1 and S2 subunits and the Receptor Binding Domain (RBD) and tested for neutralization activity using fully infectious SARS-CoV-2 virus.

[0230] Spike Trimer and Envelope Proteins: ELISA assays were conducted to measure binding to the spike trimer (Acro Biosystems) and the envelope protein (Abcam). Briefly, antibodies were diluted to two concentrations, 1:50 and 1:500, irrespective of initial antibody concentration, and tested for binding against the two proteins in singlet (i.e., individually). An antibody was positive for binding to the antigen if the optical density value for the antibody diluted 1:50 measured at least two-fold greater than the human isotype negative control.

[0231] S1, S2, RBD, and Nucleocapsid Proteins: Bio-layer interferometry (BLI) was used to quantify binding avidity for all antibodies to the S1, S2, RBD (all obtained from Sino Biological) & N (Acro Biosystems) proteins. In these experiments, antigens were diluted to 5 μg/mL and loaded onto anti-human IgG Fc Capture sensors (AHC). Loaded sensors were dipped into antigen at a concentration of 300 nM. Data was captured using an Octet instrument and kinetic constants were calculated using a monovalent (1:1) binding model. On- and off-rates and estimated KD values were reported for those antibody-antigen pairs with a binding response (nm) ≥0.05. Antibody-antigen pairs where the binding response (nm) was <0.05 was labeled as less than the lower limit of detection (<LLOD).

[0232] To determine the appropriate concentration of antigen to add as the analyte, the RBD, S1 and S2 antigens were tested at two concentrations (300 nM and 1,000 nM) for binding to both positive control antibodies expected to bind to the test antigen, and negative control antibodies not expected to bind to the test antigen. FIG. 1 demonstrates control binding of three antibodies to the three proteins. The control anti-spike (anti-S) antibody (Sino Biological) binds to RBD and S1 proteins with KD values of 5.70E-12M and 2.69E-9M as expected. In contrast, this antibody demonstrates no measurable binding against S2 protein. Reciprocally, the anti-S2 control antibody (Sino Biological) binds to the S2 protein with a KD value of 2.06E-11M but does not bind to either the RBD or S1 proteins. ACE2-hFc (LakePharma), a fusion protein consisting of human angiotensin I-converting enzyme-2 fused to a human IgG1 Fc, is a third control that binds to both RBD and S1 with KD values of 1.75E-9M and 1.03E-7M respectively, but not to the S2 protein (Table 1). Data from this experiment suggested that all three proteins could be diluted to 300 nM for estimating antibody KD values. The N protein (Acro Biosystems) was similarly evaluated using an anti-N antibody (Acro Biosystems) as a positive control. The data indicated that the N protein could similarly be diluted to 300 nM for evaluation of experimental antibodies.

[0233] Neutralization Assay: Irrespective of the binding results, antibodies were also tested for functional activity against fully infectious SARS-CoV-2 in an in vitro neutralization assay. Antibodies were first screened against the virus at two concentrations: 50 μg/mL and 5 μg/mL. Antibodies that demonstrated a reduction in plaque formation (indicating potential neutralizing activity) at 50 μg/mL were tested in a dilution series using 8, 3-fold dilutions beginning at 50 μg/mL. The antibody concentration required to inhibit 50% of the viral infection (IC₅₀) was calculated in Prism software using a dose-response model with a variable slope.

### Results

[0234] In total, 235 antibodies were expressed and 227 generated sufficient material to be tested in binding and neutralization assays. Ninety-seven antibodies demonstrated binding to at least 1 of the proteins tested (Table 2 and Tables 3A-C). Most antibodies bound to either the N or E protein or to at least one form of the Spike protein. A few antibodies demonstrated measurable binding to two or more distinct proteins (e.g., Spike and Envelope). All combinations of antibody binding are reported in Table 2, where the numbers represent the number of antibodies from the donor that recognizes the viral protein. Fifty-eight antibodies demonstrated spike-specific binding to at least one of the spike antigens tested, and 34 antibodies demonstrated binding to at least two of the spike antigens tested. Additionally, 9 antibodies demonstrated binding to E, and 17 antibodies to N. An additional 13 antibodies bound to some combination of the three proteins. The binding activity for these thirteen antibodies may indicate poly-specific activity that is not limited to SARS-CoV-2.

[0235] All antibodies, irrespective of binding specificity, were tested for functional activity in a neutralization assay using fully infectious SARS-CoV-2. We chose to take this epitope-agnostic screening approach so that antibodies with unique binding attributes not observed with traditional ELISA and BLI methods but with neutralizing activity were identified. Seventeen antibodies met the initial criteria in the preliminary screen by demonstrating a reduction in virus infectivity at 50 μg/mL. These antibodies were subsequently tested in a dilution series using 8, 3-fold dilutions beginning at 50 μg/mL. Of the 17 antibodies, 12 demonstrated measurable neutralization activity ≤50 μg/mL. ICs values ranged from 0.075 μg/mL to 33.7 μg/mL (Table 3A-C).

[0236] The majority of the 12 neutralizing antibodies demonstrated IC₅₀ values ≥1 μg/mL except the one antibody, AB-009614 (IC₅₀: 0.075 μg/mL; FIG. 2). This antibody demonstrated weak binding to the Spike trimer, but none of the monomeric forms of Spike despite demonstrating the most potent neutralizing activity. These data suggest that the antibody targets a conformationally sensitive epitope only exposed in the context of the complete trimer. AB-009614 bound to neither the E nor N proteins (FIG. 2). Among the remaining 11 antibodies with neutralizing activity ≥1 μg/mL, 6 bound to the RBD and S1 monomers as measured by BLI and to the Spike trimer by ELISA (FIGS. 3-8). Three other antibodies bound to the S1 monomer and Spike trimer, but did not bind to the RBD monomer, suggesting they target a different epitope than the first 6 Abs (FIGS. 9-11). One antibody, AB-009681, surprisingly did not demonstrate binding to any of the SARS-CoV-2 proteins despite an IC₅₀ of 3.9 μg/mL (FIG. 12). The last antibody, AB-009734, demonstrated binding to the S2 monomer and to the Spike trimer, as well as the Nucleocapsid protein and neutralized SARS-CoV-2 with an IC₅₀ of 21.4 μg/mL (FIG. 13). The binding data for this antibody suggests that this antibody may bind to a unique target found on both the S2 and Nucleocapsid proteins.

### Example 6

[0237] The antibodies identified to potentially have neutralizing activity in Example 5 were also assayed for neutralizing activity against the SARS CoV-2 Wuhan virus and variants using the Phenosense® Anti-SARS-CoV-2 Neutralizing Antibody Assay (CoV nAb Assay) (Monogram Biosciences/Labcorp). (Huang, Y., et al., medRxiv 2021.09.09.21263049, incorporated by reference herein in its entirety.) Neutralizing antibody activity was measured in a formally validated assay that utilized lentiviral particles pseudotyped with full-length SARS-CoV-2 Spike protein and containing a firefly luciferase (Luc) reporter gene for quantitative measurements of infection by relative luminescence units (RLU). The backbone vector used in pseudovirus creation, F-lucP.CNDOΔU3 encodes the HIV genome with firefly luciferase replacing the HIV env gene. A codon-optimized version of the full-length spike gene of the Wuhan-1 SARS-CoV-2 strain (MN908947.3) (GenScript) was cloned into the Monogram proprietary env expression vector, pCXAS-PXMX, for use in the assay. All the spike mutations described in FIG. 2 including the D614G spike mutation were introduced into the original Wuhan sequence by site-directed mutagenesis. Sequences of the spike gene and expression vector were confirmed by full-length sequencing using Illumina MiSeq NGS.

[0238] Pseudovirus stock was produced in HEK 293 cells via a calcium phosphate transfection using a combination of spike plasmid (pCXAS-SARS-CoV-2-D614G) and lentiviral backbone plasmid (F-lucP.CNDOΔU3). Transfected 10 cm² plates were re-fed the next day and harvested on Day 2 post transfection. The pseudovirus stock (supernatant) was collected, filtered and frozen at 570° C. in single-use aliquots. Pseudovirus infectivity was screened at multiple dilutions using HEK293 cells transiently transfected with ACE2 and TMPRSS2 expression vectors. RLUs were adjusted to ˜50,000 for use in the neutralization assay. Neutralization was performed in white 96-well plates by incubating pseudovirus with 8, serial 4-fold dilutions of antibody starting at a concentration of 50 μg/mL for one hour at 37° C.

[0239] HEK293 target cells, which had been transfected the previous day with ACE2 and TMPRSS2 expression plasmids, were detached from 10 cm2 plates using trypsin/EDTA and re-suspended in culture medium to a final concentration that accommodated the addition of 10,000 cells per well. Cell suspension was added to the antibody-virus mixtures and assay plates were incubated at 37° C. in 7% CO2 for 3 days. On the day of assay read, Steady Glo (Promega) was added to each well. Reactions were incubated briefly and luciferase signal (RLU) was measured using a luminometer. Neutralization titers represent the inhibitory dilution (ID) of serum samples at which RLUs were reduced by either 50% (ID50) or 80% (ID80) compared to virus control wells (no serum wells).

[0240] The Monogram assay employs a specificity control which is created using the same HIV backbone/Luc sequence used in the SARS-CoV-2 pseudovirus. The envelope is 1949 Influenza A H10N3. It is unlikely for antibodies to have been discovered against this rare avian influenza virus in humans. The specificity control is designed to detect non-antibody factors (e.g., ART therapy) that could inhibit SARS-CoV-2 pseudovirus and result in false positive measurements of antibody neutralization. Positive anti-SARS-CoV-2 nAb activity was defined as an anti-SARS-CoV-2 nAb titer >3 times greater than the titer of the same serum tested with the specificity control.

[0241] Using the Monogram assay, the antibodies were assayed for neutralizing activity against the following SARS-CoV-2 variants: Alpha (B.1.1.7), Beta (B.1.351), Gamma (P.1.B.1.1.28), Delta (B.1.617.2), Delta-plus (B.1.617.2.1), Epsilon (B.1.427/9), Mu (B.1.621) and Omicron (B.1.1.529). Table 9). Known neutralizing antibodies COVA1-21; CA1; REGN10933 (Casirivimab); REGN10987 (Imdevimab); LY-CoV016 (CB-6, JS-016, LY3832479, etesevimab) and LY-CoV555 (bamlanivimab) were included as positive controls. CR3022 and an anti-nucleocapsid antibody were included as negative controls.

[0242] Of the antibodies tested, AB-009614, AB-010019, AB-009270, AB-009346, AB-009681, AB-009761, AB-009615, AB-009620, AB-009734, AB-009760, AB-009281 showed neutralizing activity against the SARS-CoV2 Wuhan virus and at least one of the viral variants. AB-009270 neutralized all but the Omicron variant, and AB-009620 neutralized all of the variants tested (Table 8).

### Example 7

[0243] This example describes methods for generating antibody variants.

[0244] Antibodies produced as described herein will be modified to generate variant antibodies having improved developability and/or to reduce the risk of clinical immunogenicity, as described above, using methods described in PCT/US2020/018745. Briefly, to reduce risk of clinical immunogenicity, the antibody sequences are evaluated to identify residues that can be engineered to increase similarity to the intended population's native immunoglobulin variable region sequences. One approach to engineering a variant to be as much like self as possible is to identify a close germline sequence and mutate as many mismatched positions (also known as “germline deviations”) to the germline residue type as possible. Each germline gene can present as different alleles in the population. The least immunogenic drug candidate, in terms of minimizing the percent of patients with an immunogenic response, would likely be one that matches an allele commonly found in the patient population. Single nucleotide polymorphism (SNP) data from the human genome can be used to approximate the frequency of alleles in the population.

[0245] Another approach to engineering a lead for reduced immunogenicity risk is to use in silico predictions of immunogenicity, such as the prediction of T cell epitopes, or use in vitro assays of immunogenicity, such as ex vivo human T cell activation. For example, services such as those offered by Lonza, United Kingdom, are available that employ platforms for the prediction of HLA binding and in vitro assessment to further identify potential epitopes.

[0246] Antibody variants can also be designed to enhance the efficacy of the antibody. For example, design parameters can focus on CDRs, e.g., CDR3. Positions to be mutated can be identified based on structural analysis of antibody-antigen co-crystals (Oyen et al., Proc. Natl. Acad Sci. USA 114:E10438-E10445, 2017; Epub Nov. 14 2017) and based on sequence information of other antibodies from the same lineage as the parent or reference antibody.

### Approaches to Mutation Design

[0247] Development liabilities can be removed or reduced by one or more mutations. Mutations are designed to preserve antibody structure and function while removing or reducing development liabilities and to improve function. In one aspect, mutations to chemically similar residues can be identified that maintain size, shape, charge, and/or polarity. Illustrative mutations are described in Table 6 or Table 7.

[0248] The antibody sequences described herein can be aligned to the putative, D and germline genes. CDRs, germline deviations, and potential liabilities can be identified. For example, non-canonical cysteines and N-glycosylation sites can be identified across the full VH and VL sequences, whereas other potential liability motifs can be identified within the CDRs.

[0249] Potential PK risk can also be estimated (Sharma et al., Proc. Natl. Acad. Sci. USA 111:18601-18606, 2014). High hydrophobicity index (HI) correlates with faster clearance, where HI<5 is preferred to reduce risk, and HI<4 is most preferred to reduce risk. However, some antibodies with HI >4, or HI >5, will not exhibit fast clearance. Secondly, too high or too low Fv charge as calculated at pH 5.5 correlates with faster clearance, where a charge between (−2, +8) is preferred to reduce risk, and a charge between (0, +6.2) is most preferred to reduce the risk of fast clearance. Table 6 and Table 7 summarize the types and number of potential liabilities.

### Design of Variants to Germline Antibodies

[0250] Framework and complementary-determining region (CDR) germline deviations in antibody sequences can be analyzed for their potential to be mutated, individually or in combination, to germline sequence, without negatively impacting binding to target SARS-CoV-2 antigens/epitopes. For each of the candidate mutations from antibody sequence to germline sequence, the risk of making the mutation can be assessed based on: (1) the change in charge if any since the change in charge is intrinsically risky; (2) conservation of the native residue in the antibody lineage versus the presence of the germline residue or other mutations at that position in the lineage and (3) the structural location of the position with respect to the target antigen epitope. Some mutations may be coupled to at least one other mutation, meaning that the risk prediction is based on making the mutation in conjunction with the other mutation(s).

Design of Variants to Remove Liabilities from Antibody Sequences

[0251] Various sequence-based liabilities in antibody sequences described herein can be analyzed for their potential to be mutated to reduce or remove the risk of liability without negatively impacting binding to SARS-CoV-2 antigens or potency of the variant antibody. Residues that contributed to the hydrophobicity index, or to reducing the Fv charge can also be assessed. Similar to the germline design, risk can be assessed based on the change in charge, shape, polarity, backbone conformation preference, and maintenance or enhancement of side-chain interactions.

### Example 8

[0252] This example describes a representative in vivo assay to test antibodies for protection from SARS-CoV-2 infection.

### Passive Transfer of Neutralizing Antibodies and SARS-CoV-2 Challenge in Syrian Hamsters

[0253] Antibodies described herein can be tested in vivo for the ability to prevent infection by SARS-CoV-2. Antibodies are selected for passive transfer/challenge experiments in a Syrian hamster animal model. See Rogers et al., Id. Candidate neutralizing antibodies are injected intraperitoneally into Syrian hamsters at a starting dose of 2 mg/animal (on average 16.5 mg/kg) and 8 μg/animal at the lowest dose. Control animals can receive 2 mg of a control IgG1. Each group of 6 animals are then is challenged intranasally 12 h post-infusion with 1×10⁶ PFU of SARS-CoV-2. The serum is collected at the time of challenge (Day 0) and Day 5, and the weight of the animals is monitored as an indicator of disease progression. On day 5, lung tissue is collected for viral burden assessment.

[0254] Syrian hamsters typically clear the virus within one week after SARS-CoV-2 infection. Hamsters were weighed as a measure of disease due to infection. Lung tissues were collected to measure the viral load on day 5. Lung viral loads are measured by real-time PCR. It is expected that animals that receive an effective dose of neutralizing antibody will show less weight loss than animals that receive a control antibody.

[0255] Antibody serum concentrations can also be measured to determine the amount of circulating antibody required for protection against SARS-CoV-2 in vivo. Antibody serum concentrations can be measured prior to the intranasal virus challenge. It is expected that antibody serum concentrations of approximately 22 μg/mL of neutralizing antibody will provide complete protection and a serum concentration of about 12 μg/mL is adequate for 50% reduced disease as measured by weight loss. Sterilizing immunity at serum concentrations that represent a large multiplier of the in vitro neutralizing IC₅₀ is observed for many viruses.

TABLE 1

| | Anti-S (Sino) | | | | Anti-S2 | | | | ACE2-hFc | | | |
|---|---|---|---|---|---|---|---|---|---|---|---|---|
| | Response | Kₐ (1/Ms) | K_{d} (1/s) | K_{D} (M) | Response | Kₐ (1/Ms) | K_{d} (1/s) | K_{D} (M) | Response | Kₐ (1/Ms) | K_{d} (1/s) | K_{D} (M) |
| RBD | 0.59 | 1.21E+05 | 6.89E−07 | 5.70E−12 | N/A | N/A | N/A | N/A | 0.26 | 5.38E+05 | 9.42E−04 | 1.75E−09 |
| S1 | 0.7 | 1.94E+04 | 5.23E−05 | 2.69E−09 | N/A | N/A | N/A | N/A | 0.43 | 1.04E+05 | 1.07E−02 | 1.03E−07 |
| S2 | N/A | N/A | N/A | N/A | 0.99 | 2.37E+04 | 4.88E−07 | 2.06E−11 | N/A | N/A | N/A | N/A |

TABLE 2

| Donor | 117-001-001 | 117-001-002 | 117-001-003 | 117-001-004 |
|---|---|---|---|---|
| Envelope | 2 | 2 | 1 | 4 |
| Nucleocapsid | 7 | 2 | 5 | 3 |
| At least one form of Spike protein | 12 | 4 | 24 | 18 |
| S Trimer | 6 | 1 | 4 | 10 |
| S2 monomer | | | 2 | 1 |
| RBD, S1 & S Trimer | 1 | 1 | 6 | 1 |
| S1, S Trimer | 5 | 1 | 7 | 3 |
| S2, S Trimer | | 1 | 5 | 3 |
| Other combinations | | | | |
| Nucleocapsid, Envelope, S Trimer | 2 | | | 1 |
| Nucleocapsid, S Trimer | 1 | | | |
| RBD, S1, S Trimer, Envelope | | | 1 | |
| S Trimer, Envelope | 3 | | | 2 |
| S2, S Trimer, Envelope | 1 | | | 1 |
| S2, S Trimer, Nucleocapsid | 1 | | | |
| No binding | 52 | 13 | 19 | 46 |

TABLE 3A

| | | Number of nucleotide | | | |
|---|---|---|---|---|---|
| | | mutations from | | | |
| | Lineage | putative germline in | | | Neutralization Activity: |
| Antibody | Size | VH and VL | Donor | Epitope | IC₅₀ (μg/mL) |
| AB-009614 | 1 | 5 | 117-001-001 | S Trimer | 0.075 |
| AB-009270 | 1 | 1 | 117-001-003 | RBD, S1, S Trimer | 1.37 |
| AB-009346 | 17 | 5 | 117-001-003 | RBD, S1, S Trimer | 2.14 |
| AB-009681 | 7 | 2 | 117-001-001 | No binding observed | 3.92 |
| AB-009761 | 9 | 7 | 117-001-001 | S1, S Trimer | 4.44 |
| AB-009615 | 1 | 2 | 117-001-003 | RBD, S1, S Trimer | 12.3 |
| AB-009620 | 1 | 3 | 117-001-002 | RBD, S1, S Trimer | 13.3 |
| AB-009661 | 2 | 1 | 117-001-001 | S1, S Trimer | 20.6 |
| AB-009734 | 11 | 34 | 117-001-001 | S2, S Trimer, Nucleocapsid | 21.43 |
| AB-009769 | 8 | 1 | 117-001-003 | S1, S Trimer | 24.47 |
| AB-009760 | 6 | 5 | 117-001-001 | RBD, S1, S Trimer | 32.76 |
| AB-009281 | 1 | 5 | 117-001-003 | RBD, S1, S Trimer | 33.7 |
| AB-009619 | 6 | 5 | 117-001-004 | S1, S Trimer | >50 |
| AB-009649 | 1 | 1 | 117-001-003 | No binding observed | >50 |
| AB-009655 | 2 | 1 | 117-001-001 | No binding observed | >50 |
| AB-009358 | 13 | 93 | 117-001-003 | S2, S Trimer | >50 |
| AB-009609 | 1 | 8 | 117-001-004 | S1, S Trimer | >50 |

TABLE 3B

| | RBD: BLI | | | | S1: BLI | | | |
|---|---|---|---|---|---|---|---|---|
| Antibody | Response | KD (M) | Kₐ (1/Ms) | K_{d} (1/s) | Response | KD (M) | Kₐ (1/Ms) | K_{d} (1/s) |
| AB-009614 | <LLOD | <LLOD | <LLOD | <LLOD | <LLOD | <LLOD | <LLOD | <LLOD |
| AB-009270 | 0.515 | 1.28E−09 | 1.57E+05 | 2.02E−04 | 0.6616 | 3.02E−09 | 6.90E+04 | 2.08E−04 |
| AB-009346 | 0.465 | 1.05E−08 | 6.06E+04 | 6.33E−04 | 0.4734 | 1.25E−08 | 4.17E+04 | 5.23E−04 |
| AB-009681 | <LLOD | <LLOD | <LLOD | <LLOD | <LLOD | <LLOD | <LLOD | <LLOD |
| AB-009761 | <LLOD | <LLOD | <LLOD | <LLOD | 0.3714 | 6.83E−08 | 2.75E+04 | 1.88E−03 |
| AB-009615 | 0.453 | 2.73E−09 | 6.51E+04 | 1.78E−04 | 0.6535 | 3.66E−08 | 7.54E+04 | 2.76E−03 |
| AB-009620 | 0.571 | 5.99E−09 | 7.09E+04 | 4.25E−04 | 0.5122 | 2.75E−08 | 2.84E+04 | 7.80E−04 |
| AB-009661 | <LLOD | <LLOD | <LLOD | <LLOD | 0.3861 | 8.40E−08 | 5.10E+04 | 4.28E−03 |
| AB-009734 | <LLOD | <LLOD | <LLOD | <LLOD | <LLOD | <LLOD | <LLOD | <LLOD |
| AB-009769 | <LLOD | <LLOD | <LLOD | <LLOD | 0.1617 | 1.06E−07 | 1.84E+04 | 1.94E−03 |
| AB-009760 | 0.597 | 3.43E−12 | 1.43E+05 | 4.88E−07 | 0.5929 | 4.16E−09 | 6.41E+04 | 2.67E−04 |
| AB-009281 | 0.439 | 5.03E−09 | 6.39E+04 | 3.21E−04 | 0.2913 | 1.67E−08 | 8.12E+04 | 1.36E−03 |
| AB-009619 | <LLOD | <LLOD | <LLOD | <LLOD | 0.1436 | 2.58E−08 | 2.81E+04 | 7.26E−04 |
| AB-009649 | <LLOD | <LLOD | <LLOD | <LLOD | <LLOD | <LLOD | <LLOD | <LLOD |
| AB-009655 | <LLOD | <LLOD | <LLOD | <LLOD | <LLOD | <LLOD | <LLOD | <LLOD |
| AB-009358 | <LLOD | <LLOD | <LLOD | <LLOD | <LLOD | <LLOD | <LLOD | <LLOD |
| AB-009609 | <LLOD | <LLOD | <LLOD | <LLOD | 0.521 | 4.94E−08 | 4.64E+04 | 2.29E−03 |

TABLE 3C

| | | | | | S | | | | | |
|---|---|---|---|---|---|---|---|---|---|---|
| | | | | | Trimer: | | | | | Envelope |
| | | | | | ELISA | | | | | ELISA |
| | S2: BLI | | | | OD (450 | Nucleocapsid | | | | OD (450 |
| Antibody | Response | KD (M) | Kₐ (1/Ms) | K_{d} (1/s) | nm)* | Response | KD (M) | Kₐ (1/Ms) | K_{d} (1/s) | nm)* |
| AB-009614 | <LLOD | <LLOD | <LLOD | <LLOD | 0.361 | <LLOD | <LLOD | <LLOD | <LLOD | <LLOD |
| AB-009270 | <LLOD | <LLOD | <LLOD | <LLOD | 2.481 | <LLOD | <LLOD | <LLOD | <LLOD | <LLOD |
| AB-009346 | <LLOD | <LLOD | <LLOD | <LLOD | 2.55 | <LLOD | <LLOD | <LLOD | <LLOD | <LLOD |
| AB-009681 | <LLOD | <LLOD | <LLOD | <LLOD | 0.095 | <LLOD | <LLOD | <LLOD | <LLOD | <LLOD |
| AB-009761 | <LLOD | <LLOD | <LLOD | <LLOD | 3.475 | <LLOD | <LLOD | <LLOD | <LLOD | <LLOD |
| AB-009615 | <LLOD | <LLOD | <LLOD | <LLOD | 2.801 | <LLOD | <LLOD | <LLOD | <LLOD | <LLOD |
| AB-009620 | <LLOD | <LLOD | <LLOD | <LLOD | 2.697 | <LLOD | <LLOD | <LLOD | <LLOD | <LLOD |
| AB-009661 | <LLOD | <LLOD | <LLOD | <LLOD | 2.863 | <LLOD | <LLOD | <LLOD | <LLOD | <LLOD |
| AB-009734 | 0.555 | 1.24E−08 | 8.28E+03 | 1.03E−04 | 3.568 | 0.661 | 2.22E−08 | 4.40E+04 | 9.79E−04 | <LLOD |
| AB-009769 | <LLOD | <LLOD | <LLOD | <LLOD | 2.868 | <LLOD | <LLOD | <LLOD | <LLOD | <LLOD |
| AB-009760 | <LLOD | <LLOD | <LLOD | <LLOD | 3.475 | <LLOD | <LLOD | <LLOD | <LLOD | <LLOD |
| AB-009281 | <LLOD | <LLOD | <LLOD | <LLOD | 2.599 | <LLOD | <LLOD | <LLOD | <LLOD | <LLOD |
| AB-009619 | <LLOD | <LLOD | <LLOD | <LLOD | 1.264 | <LLOD | <LLOD | <LLOD | <LLOD | <LLOD |
| AB-009649 | <LLOD | <LLOD | <LLOD | <LLOD | 0.155 | <LLOD | <LLOD | <LLOD | <LLOD | <LLOD |
| AB-009655 | <LLOD | <LLOD | <LLOD | <LLOD | 0.071 | <LLOD | <LLOD | <LLOD | <LLOD | <LLOD |
| AB-009358 | 0.341 | 4.78E−07 | 3.69E+03 | 1.76E−03 | 2.762 | <LLOD | <LLOD | <LLOD | <LLOD | <LLOD |
| AB-009609 | <LLOD | <LLOD | <LLOD | <LLOD | 2.226 | <LLOD | <LLOD | <LLOD | <LLOD | <LLOD |

TABLE 4
CDR sequences

| Anti- | | | | | | |
|---|---|---|---|---|---|---|
| body | HCDR1 | HCDR2 | HCDR3 | LCDR1 | LCDR2 | LCDR3 |
| AB- | GYTFTSYGI | WISAYNGNTNYAQ | AREGDCSGGSCYSGYYYYY | RASQSVSSYLA | DASNRAT | QQRSNWGT |
| 009269 | S (SEQ ID | KLQG (SEQ ID | GMDV (SEQ ID NO: | (SEQ ID NO: | (SEQ ID | (SEQ ID |
| | NO: 1) | NO: 236) | 471) | 706) | NO: 941) | NO: 1176) |
| AB- | GFTFTSSA | WIVVGSGNTNYAQ | AVNYCSSTSCYDAFDI | RASQSVSSSYLA | GASSRAT | QQYGSSPWT |
| 009270 | MQ (SEQ | KFQE 9 (SEQ | (SEQ ID NO: 472) | (SEQ ID NO: | (SEQ ID | (SEQ ID |
| | ID NO: 2) | ID NO: 237) | | 707) | NO: 942) | NO: 1177) |
| AB- | GYTLTELS | GFDPEDGETIYAQ | ATAPPYCSSTSCPINWFDP | SGSSSNIGNNYV | DNNKRPS | GTWDSSLSEW |
| 009272 | MH (SEQ | KFQG (SEQ ID | (SEQ ID NO: 473) | S (SEQ ID | (SEQ ID | V (SEQ ID |
| | ID NO: 3) | NO: 238) | | NO: 708) | NO: 943) | NO: 1178) |
| AB- | GGTFSSYAI | GIIPIFGTANYAQK | ARVGVYDSSGYYFDY | RASQSVSSYLA | DASNRAT | QQRSNWPPRL |
| 009273 | S (SEQ ID | FQG (SEQ ID | (SEQ ID NO: 474) | (SEQ ID NO: | (SEQ ID | T (SEQ ID |
| | NO: 4) | NO: 239) | | 709) | NO: 944) | NO: 1179) |
| AB- | GFSLSTSG | RIDWDDDKFYSTS | ARSYSSSLPFDY (SEQ | KSSQSVLYSSNN | WASTRES | QQYYSTPFT |
| 009274 | MRVS (SEQ | LKT (SEQ ID | ID NO: 475) | KNYLA (SEQ | (SEQ ID | (SEQ ID |
| | ID NO: 5) | NO: 240) | | ID NO: 710) | NO: 945) | NO: 1180) |
| AB- | GFSLSTSG | RIDWDDDKFYSTS | ARSNYDILTGRLDAFDI | SGSSSNIGSNYV | RNNQRPS | AAWDDSLSG |
| 009275 | MRVS (SEQ | LKT (SEQ ID | (SEQ ID NO: 476) | Y (SEQ ID | (SEQ ID | WV (SEQ ID |
| | ID NO: 6) | NO: 241) | | NO: 711) | NO: 946) | NO: 1181) |
| AB- | GFTFSSYA | AISGSGGSTYYADS | AKDRNYDFWSGYYFDY | RASQGISSYLA | AASTLQS | QQLNSYPLT |
| 009276 | MS (SEQ | VKG (SEQ ID | (SEQ ID NO: 477) | (SEQ ID NO: | (SEQ ID | (SEQ ID |
| | ID NO: 7) | NO: 242) | | 712) | NO: 947) | NO: 1182) |
| AB- | GFTFSSYA | VISYDGSNKYYAD | ARDGGGLLLN (SEQ ID | SGDKLGDKYAC | QDSKRPS | QAWDSSTVV |
| 009277 | MH (SEQ | SVKG (SEQ ID | NO: 478) | (SEQ ID NO: | (SEQ ID | (SEQ ID |
| | ID NO: 8) | NO: 243) | | 713) | NO: 948) | NO: 1183) |
| AB- | GFTFSSYA | VISYDGSNKYYAD | ARDGSSWYIDY (SEQ | GGNNIGSKSVH | DDSDRPS | QVWDSSSDHY |
| 009278 | MH (SEQ | SVKG (SEQ ID | ID NO: 479) | (SEQ ID NO: | (SEQ ID | V (SEQ ID |
| | ID NO: 9) | NO: 244) | | 714) | NO: 949) | NO: 1184) |
| AB- | GFTFSSYA | VISYDGSNKYYAD | ARPRGGSYYSAFDI | RASQSVSSSYLA | GASSRAT | QQYGSSPWT |
| 009279 | MH (SEQ | SVKG (SEQ ID | (SEQ ID NO: 480) | (SEQ ID NO: | (SEQ ID | (SEQ ID |
| | ID NO: | NO: 245) | | 715) | NO: 950) | NO: 1185) |
| | 10) | | | | | |
| AB- | GFTFSSYG | VISYDGSNKYYAD | AKSRGGGYYYYYMDV | RASQGISNYLA | AASSLQS | QQYNSYPPT |
| 009280 | MH (SEQ | SVKG (SEQ ID | (SEQ ID NO: 481) | (SEQ ID NO: | (SEQ ID | (SEQ ID |
| | ID NO: | NO: 246) | | 716) | NO: 951) | NO: 1186) |
| | 11) | | | | | |
| AB- | GFTVSSNY | VIYSGGSTYYADS | ARDLYYYGMDV (SEQ | RASQGISSYLA | AASTLQS | QQLNSYPT |
| 009281 | MS (SEQ | VKG (SEQ ID | ID NO: 482) | (SEQ ID NO: | (SEQ ID | (SEQ ID |
| | ID NO: | NO: 247) | | 717) | NO: 952) | NO: 1187) |
| | 12) | | | | | |
| AB- | GFTVSSNY | VIYSGGSTYYADS | ARILPLNWYYFDY (SEQ | TGSSSNIGAGYD | GNSNRPS | QSYDSSLSGS |
| 009282 | MS (SEQ | VKG (SEQ ID | ID NO: 483) | VH (SEQ ID | (SEQ ID | GV (SEQ ID |
| | ID NO: | NO: 248) | | NO: 718) | NO: 953) | NO: 1188) |
| | 13) | | | | | |
| AB- | GFTVSSNY | VIYSGGSTYYADS | ATSSFDYYYYFMDV | SGDKLGDKYAC | QDTKRPS | QAWDSSIVV |
| 009283 | MS (SEQ | VKG (SEQ ID | (SEQ ID NO: 484) | (SEQ ID NO: | (SEQ ID | (SEQ ID |
| | ID NO: | NO: 249) | | 719) | NO: 954) | NO: 1189) |
| | 14) | | | | | |
| AB- | GGSISSGG | YIYYSGSTYYNPSL | ARAPTIFGVVIGWFDP | RASQSVSSSYLA | GASSRAT | QQYGSSPLT |
| 009284 | YYWS | KS (SEQ ID | (SEQ ID NO: 485) | (SEQ ID NO: | (SEQ ID | (SEQ ID |
| | (SEQ ID | NO: 250) | | 720) | NO: 955) | NO: 1190) |
| | NO: 15) | | | | | |
| AB- | GGSISSGG | YIYYSGSTYYNPSL | ARAPRITIFGVVSPFDY | RASQSVSSSYLA | GASSRAT | QQYGSSPLT |
| 009285 | YYWS | KS (SEQ ID | (SEQ ID NO: 486) | (SEQ ID NO: | (SEQ ID | (SEQ ID |
| | (SEQ ID | NO: 251) | | 721) | NO: 956) | NO: 1191) |
| | NO: 16) | | | | | |
| AB- | GGSISSGD | YIYYSGSTYYNPSL | AREGRFLEWLLSVNYYYYM | QGDSLRSYYAS | GKNNRPS | NSRDSSGNHG |
| 009286 | YYWS | KS (SEQ ID | DV (SEQ ID NO: 487) | (SEQ ID NO: | (SEQ ID | V (SEQ ID |
| | (SEQ ID | NO: 252) | | 722) | NO: 957) | NO: 1192) |
| | NO: 17) | | | | | |
| AB- | GGSISSSSY | SIYYSGSTYYNPSL | ARTRITIFGGERYFDL | RASQGISSYLA | AASTLQS | QQLNSYPLT |
| 009287 | YWG (SEQ | KS (SEQ ID | (SEQ ID NO: 488) | (SEQ ID NO: | (SEQ ID | (SEQ ID |
| | ID NO: | NO: 253) | | 723) | NO: 958) | NO: 1193) |
| | 18) | | | | | |
| AB- | GGSISSYY | YIYYSGSTNYNPSL | ARGFDY (SEQ ID NO: | RASQSVSSSYLA | GASSRAT | QQYGSSPWT |
| 009288 | WS (SEQ | KS (SEQ ID | 489) | (SEQ ID NO: | (SEQ ID | (SEQ ID |
| | ID NO: | NO: 254) | | 724) | NO: 959) | NO: 1194) |
| | 19) | | | | | |
| AB- | GYSFTSYW | IIYPGDSDTRYSPSF | ARRGFGLTYYGMDV | RSSQSLLHSNGY | LGSNRAS | MQALQTPQT |
| 009289 | IG (SEQ | QG (SEQ ID NO: | (SEQ ID NO: 490) | NYLD (SEQ ID | (SEQ ID | (SEQ ID |
| | ID NO: | 255) | | NO: 725) | NO: 960) | NO: 1195) |
| | 20) | | | | | |
| AB- | GFAFSDHH | RIRDKADSYTTEY | ASSHSRGYYAFDY | RASQSVNKFVLA | GASTRAT | QLYDRSPPP |
| 009290 | MD (SEQ | AASVRG (SEQ | (SEQ ID NO: 491) | (SEQ ID NO: | (SEQ ID | (SEQ ID |
| | ID NO: | ID NO: 256) | | 726) | NO: 961) | NO: 1196) |
| | 21) | | | | | |
| AB- | GFTFTTYA | AINAGGAKTHYAD | AKVPSYIYDSRDDYLDF | RASQSVSSYLA | DASSRAT | QQRSDWPLLT |
| 009291 | MF (SEQ | SVRG (SEQ ID | (SEQ ID NO: 492) | (SEQ ID NO: | (SEQ ID | (SEQ ID |
| | ID NO: | NO: 257) | | 727) | NO: 962) | NO: 1197) |
| | 22) | | | | | |
| AB- | GFTVRYNY | IIYRGDRGGSTYYI | ASSHSADYLGPFDY | RASQSITNNYLA | HASKRAS | QQFGTFGT |
| 009292 | MS (SEQ | DSVKG (SEQ ID | (SEQ ID NO: 493) | (SEQ ID NO: | (SEQ ID | (SEQ ID |
| | ID NO: | NO: 258) | | 728) | NO: 963) | NO: 1198) |
| | 23) | | | | | |
| AB- | GFNFNNYG | FISYEGSITHYADS | AKRREVLHLWRDEMDV | RASQDITNSLA | AASTLHS | QQYKTYPFT |
| 009293 | MH (SEQ | VKG (SEQ ID | (SEQ ID NO: 494) | (SEQ ID NO: | (SEQ ID | (SEQ ID |
| | ID NO: | NO: 259) | | 729) | NO: 964) | NO: 1199) |
| | 24) | | | | | |
| AB- | GFTLSTYS | VFSATGGTTDYAD | VKYLQSGDEGY (SEQ | RASQSVSAYFA | DATNRAT | QQRSFWPLT |
| 009294 | VT (SEQ | SVRG (SEQ ID | ID NO: 495) | (SEQ ID NO: | (SEQ ID | (SEQ ID |
| | ID NO: | NO: 260) | | 730) | NO: 965) | NO: 1200) |
| | 25) | | | | | |
| AB- | GFTFSSYA | ILWPDGGKKYFAD | ARDPASGWGLDP (SEQ | TGHNSNIGAGSD | GNRNRPS | QSFDSSLNVY |
| 009295 | MH (SEQ | SVKG (SEQ ID | ID NO: 496) | (SEQ ID NO: | (SEQ ID | V (SEQ ID |
| | ID NO: | NO: 261) | | 731)VH | NO: 966) | NO: 1201) |
| | 26) | | | | | |
| AB- | GYTFTSYDI | WMNPNSGNTGYA | ARAAKRITIFGTRGYYFDY | SGDKLGDKYAC | QDSKRPS | QAWDSSTAWE |
| 009296 | N (SEQ ID | QKFQG (SEQ | (SEQ ID NO: 497) | (SEQ ID NO: | (SEQ ID | V (SEQ ID |
| | NO: 27) | ID NO: 262) | | 732) | NO: 967) | NO: 1202) |
| AB- | GYTFTSYGI | WISAYSGNTNYAQ | ARDSSSWPYVSLGY | RSSQSLLHSNGY | LGSNRAS | MQALQTPRT |
| 009297 | S (SEQ ID | KLQG (SEQ ID | (SEQ ID NO: 498) | (SEQ ID NO: | (SEQ ID | (SEQ ID |
| | NO: 28) | NO: 263) | | 733)NYLD | NO: 968) | NO: 1203) |
| AB- | GGSISSHY | YIYYSGSTNYNPSL | ARIPRGWLQSPSYYFDY | RASQSISSYLN | AASSLQS | QQSYSTPQT |
| 009298 | WS (SEQ | KS (SEQ ID | (SEQ ID NO: 499) | (SEQ ID NO: | (SEQ ID | (SEQ ID |
| | ID NO: | NO: 264) | | 734) | NO: 969) | NO: 1204) |
| | 29) | | | | | |
| AB | GYTFSNYY | IIKPSAGRTIYAQK | ARGGGPTDRDY (SEQ | TGNTNNIGSHAV | RNSLPS | STWDNSLSAV |
| 009299 | MH (SEQ | FVG (SEQ ID | ID NO: 500) | (SEQ ID NO: | (SEQ ID | V (SEQ ID |
| | ID NO: | NO: 265) | | 735)G | NO: 970) | NO: 1205) |
| | 30) | | | | | |
| AB- | GFTFSSYR | SISSSSSYIYYANSV | ARVVWQLVENYYYYMDV | RASQSVSSNLA | GASTRAT | QQYNNWPPIT |
| 009300 | MN (SEQ | KG (SEQ ID NO: | (SEQ ID NO: 501) | (SEQ ID NO: | (SEQ ID | (SEQ ID |
| | ID NO: | 266) | | 736) | NO: 971) | NO: 1206) |
| | 31) | | | | | |
| AB- | GGSFTNYY | EINHSGSTNYKPSL | ARRLGYDNGWGTYFYGLD | QGDSLRKYYPT | GKNTRHS | NSRDSSDSRN |
| 009301 | WN (SEQ | KS (SEQ ID | V (SEQ ID NO: 502) | (SEQ ID NO: | (SEQ ID | WV (SEQ ID |
| | ID NO: | NO: 267) | | 737) | NO: 972) | NO: 1207) |
| | 32) | | | | | |
| AB- | GGSIISTSH | TIYYSGNTYYNPSL | ARRSRAVAGKYYWYYDL | SGDALPKKYAY | EDTKRPS | YSTDSSGYHE |
| 009302 | YWG (SEQ | TS (SEQ ID | (SEQ ID NO: 503) | (SEQ ID NO: | (SEQ ID | V (SEQ ID |
| | ID NO: | NO: 268) | | 738) | NO: 973) | NO: 1208) |
| | 33) | | | | | |
| AB- | GFTFSTYW | NIKPDESEIHYVDS | ARLRAVGGDDTFDV | RASQSINTYLN | LASSLQS | QQSYRSWT |
| 009303 | MT (SEQ | VKG (SEQ ID | (SEQ ID NO: 504) | (SEQ ID NO: | (SEQ ID | (SEQ ID |
| | ID NO: | NO: 269) | | 739) | NO: 974) | NO: 1209) |
| | 34) | | | | | |
| AB- | GFTFSDYA | AITENGFTTYYADS | AKYWSLSGPTELLDS | RASQAITNYLA | SASTLQS | QQYYSYPLT |
| 009304 | MT (SEQ | MRG (SEQ ID | (SEQ ID NO: 505) | (SEQ ID NO: | (SEQ ID | (SEQ ID |
| | ID NO: | NO: 270) | | 740) | NO: 975) | NO: 1210) |
| | 35) | | | | | |
| AB- | GFTFSSYS | VIDNRGGNIHYSDS | AQYVQEGMDV (SEQ | RASQSVRNFFA | GASNRAT | QQRFDWPLT |
| 009305 | MS (SEQ | VRV (SEQ ID | ID NO: 506) | (SEQ ID NO: | (SEQ ID | (SEQ ID |
| | ID NO: | NO: 271) | | 741) | NO: 976) | NO: 1211) |
| | 36) | | | | | |
| AB- | GYTFTSYQ | LIDPDTGGTRYTQ | ARGGRVGATYPYNMDV | SGDALPKKYAY | EDSKRPS | FSTDSSGNHG |
| 009306 | MH (SEQ | NFQG (SEQ ID | (SEQ ID NO: 507) | (SEQ ID NO: | (SEQ ID | V (SEQ ID |
| | ID NO: | NO: 272) | | 742) | NO: 977) | NO: 1212) |
| | 37) | | | | | |
| AB- | GGSISGRG | DISSSGSTNYNPFL | ARDRRLYGDFYYYGMDV | AGSSSNIGTGYD | GNTNRPS | QSYDSSLAGS |
| 009307 | YFWT | KS (SEQ ID | (SEQ ID NO: 508) | (SEQ ID NO: | (SEQ ID | RV (SEQ ID |
| | (SEQ ID | NO: 273) | | 743)VH | NO: 978) | NO: 1213) |
| | NO: 38) | | | | | |
| AB- | GFSFNSYW | SIKQDGSETYYVD | ARGVDGISTIVVLVFWNWY | QGDSLRNYYAS | GKNNRPS | NSRDANTNHV |
| 009308 | MS (SEQ | SVKG (SEQ ID | FDL (SEQ ID NO: | (SEQ ID NO: | (SEQ ID | L (SEQ ID |
| | ID NO: | NO: 274) | 509) | 744) | NO: 979) | NO: 1214) |
| | 39) | | | | | |
| AB- | VGSISSHY | YIYYSGSTNYNPSL | ARSGRGWLQLNPSYYFDY | RASQSVSSSYLA | GASSRAT | QQYGSSPPGT |
| 009309 | WS (SEQ | KS (SEQ ID | (SEQ ID NO: 510) | (SEQ ID NO: | (SEQ ID | (SEQ ID |
| | ID NO: | NO: 275) | | 745) | NO: 980) | NO: 1215) |
| | 40) | | | | | |
| AB- | GFTFSSYA | AISGSGTSTYYADS | AKGYPRYYYGMDV (SEQ | RASQSLSSSNLA | GASSRAT | QQYGSSPFT |
| 009310 | MS (SEQ | VKG (SEQ ID | ID NO: 511) | (SEQ ID NO: | (SEQ ID | (SEQ ID |
| | ID NO: | NO: 276) | | 746) | NO: 981) | NO: 1216) |
| | 41) | | | | | |
| AB- | GYTFTSYDI | WMNPNSGNTGYA | ARRRAATWSIYYYYYYMD | TGTSSDVGGYN | DVSNRPS | TSYTSSSTLE |
| 009311 | N (SEQ | QKFQG (SEQ | V (SEQ ID NO: 512) | (SEQ ID NO: | (SEQ ID | GWV (SEQ |
| | ID NO: | ID NO: 277) | | 747)YVS | NO: 982) | ID NO: |
| | 42) | | | | | 1217) |
| AB- | GFIFSNYW | NIKQDGGEQYYVD | ARSTYLPAAGTMNF | RASHGISTWLA | AASNLQS | HQYNSYPFT |
| 009312 | MS (SEQ | SVKG (SEQ ID | (SEQ ID NO: 513) | (SEQ ID NO: | (SEQ ID | (SEQ ID |
| | ID NO: | NO: 278) | | 748) | NO: 983) | NO: 1218) |
| | 43) | | | | | |
| AB- | GGSFSGYY | EINHSGSTNYNPSL | ARGNIVVVPAAMGVFLYYY | QGDSLRSYYAS | GKNNRPS | NSRDSSGNHL |
| 009313 | WS (SEQ | KS (SEQ ID | YSMDV (SEQ ID NO: | (SEQ ID NO: | (SEQ ID | VV (SEQ ID |
| | ID NO: | NO: 279) | 514) | 749) | NO: 984) | NO: 1219) |
| | 44) | | | | | |
| AB- | GGSISSHY | YIYYSGSTNYNPSL | ARGERQWLQLYSYYGMDV | RASQSVSSSYLA | GASSRAT | QQYGSSPLT |
| 009314 | WS (SEQ | KS (SEQ ID | (SEQ ID NO: 515) | (SEQ ID NO: | (SEQ ID | (SEQ ID |
| | ID NO: | NO: 280) | | 750) | NO: 985) | NO: 1220) |
| | 45) | | | | | |
| AB- | GYTFTSYGI | WISAYNGNTNYAQ | ARDVRMITFGGVIVYFDY | QGDSLRSYYAS | GKNNRPS | NSRDSSGNHR |
| 009315 | S (SEQ | KLQG (SEQ ID | (SEQ ID NO: 516) | (SEQ ID NO: | (SEQ ID | V (SEQ ID |
| | ID NO: | NO: 281) | | 751) | NO: 986) | NO: 1221) |
| | 46) | | | | | |
| AB- | GFTFSNYW | SINNDGSNTRYAD | ARPWGY (SEQ ID | KSSQSLLQSDGK | EVSKRFS | MQSIQVPIT |
| 009316 | MH (SEQ | SVKG (SEQ ID | NO: 517) | TYLY (SEQ ID | (SEQ ID | (SEQ ID |
| | ID NO: | NO: 282) | | NO: 752) | NO: 987) | NO: 1222) |
| | 47) | | | | | |
| AB- | GYTFTSYDI | WMNPNSGNTGYA | ARGMKVVTIFGRREYYFDY | SGDKLGDKYAC | QDSKRPS | QAWDSSTVV |
| 009317 | N (SEQ ID | QKFQG (SEQ | (SEQ ID NO: 518) | (SEQ ID NO: | (SEQ ID | (SEQ ID |
| | NO: 48) | ID NO: 283) | | 753) | NO: 988) | NO: 1223) |
| AB- | GAFISTSNS | SENYGGSSYFNPSL | ARRPSLGFGSSWNFDL | TGTSSDIGGYNY | DVNKRPS | SSYAGSYTYV |
| 009318 | FWG (SEQ | KR (SEQ ID NO: | (SEQ ID NO: 519) | (SEQ ID NO: | (SEQ ID | V (SEQ ID |
| | ID NO: | 284) | | 754) VS | NO: 989) | NO: 1224) |
| | 49) | | | | | |
| AB- | GFSFSNDW | NINQDGSEKYSVD | VRDAGG (SEQ ID | RSSQSLLYSNGN | KVSIRDS | VQGTHWPFT |
| 009319 | LS (SEQ | SVKG (SEQ ID | NO: 520) | TYLS (SEQ ID | (SEQ ID | (SEQ ID |
| | ID NO: | NO: 285) | | NO: 755) | NO: 990) | NO: 1225) |
| | 50) | | | | | |
| AB- | GGTLSRCV | RIIPIFGTVNYAQK | ANTDIGDVRFYGMDV | RSSQSLLDSEDG | TLSYRAS | MQSMEFPWT |
| 009320 | IT (SEQ | FQG (SEQ ID | (SEQ ID NO: 521) | NTYLD (SEQ | (SEQ ID | (SEQ ID |
| | ID NO: | NO: 286) | | ID NO: 756) | NO: 991) | NO: 1226) |
| | 51) | | | | | |
| AB- | GGSISDGD | YISYSGSTYYNPSL | ARIRGERITIFAVLVTGAF | RASQSVTSSYLA | GASSRAT | QQYGSSPLT |
| 009321 | YYWS (SEQ | KS (SEQ ID | DV (SEQ ID NO: 522) | (SEQ ID NO: | (SEQ ID | (SEQ ID |
| | ID NO: | NO: 287) | | 757) | NO: 992) | NO: 1227) |
| | 52) | | | | | |
| AB- | GDSISGTK | SFYYNWGSTSYNA | ARRLEPRHYFDT (SEQ | TRSSGSIASNYV | EDNQRPS | QSYDKGWV |
| 009322 | NYWA (SEQ | SLKS (SEQ ID | ID NO: 523) | Q (SEQ ID | (SEQ ID | (SEQ ID |
| | ID NO: | NO: 288) | | NO: 758) | NO: 993) | NO: 1228) |
| | 53) | | | | | |
| AB- | GYSLSLLT | SFDPQDGETMYAQ | ATDDVSLVVIYALAI | RASQSVSSNYLA | GASSRAT | HQYGTSPHT |
| 009323 | MY (SEQ | KFQG (SEQ ID | (SEQ ID NO: 524) | (SEQ ID NO: | (SEQ ID | (SEQ ID |
| | ID NO: | NO: 289) | | 759) | NO: 994) | NO: 1229) |
| | 54) | | | | | |
| AB- | GFTFSDYDI | HITLTGRTYYVDS | AKHLIRAYDY (SEQ ID | RASQSVTTFLG | DASNRAP | QQRYNWPLT |
| 009324 | S (SEQ ID | VQG (SEQ ID | NO: 525) | (SEQ ID NO: | (SEQ ID | (SEQ ID |
| | NO: 55) | NO: 290) | | 760) | NO: 995) | NO: 1230) |
| AB- | GFTFNNYG | LISYEGSLKYYGDS | AKAGGIFAIHYYGMNV | SGSSSNIGKNYV | DNNKRPS | VTWDSSLSAG |
| 009325 | MH (SEQ | VRG (SEQ ID | (SEQ ID NO: 526) | S (SEQ ID | (SEQ ID | V (SEQ ID |
| | ID NO: | NO: 291) | | NO: 761) | NO: 996) | NO: 1231) |
| | 56) | | | | | |
| AB- | GGSISSSSY | SIYYSGSTYYNPSL | ARDGAPLYDILTHDAFDI | RASQSISSWLA | KASSLES | QQYNSYPYT |
| 009326 | YWG (SEQ | KS (SEQ ID | (SEQ ID NO: 527) | (SEQ ID NO: | SEQ ID | (SEQ ID |
| | ID NO: | NO: 292) | | 762) | NO: 997) | NO: 1232) |
| | 57) | | | | | |
| AB- | GLPFSNPR | RIRSKADGGTSDY | ATSHSFYYDGPFDY | RASQTVSRNYLA | SASIRAT | QHYGSSPPYT |
| 009327 | MS (SEQ | AAPVKG (SEQ | (SEQ ID NO: 528) | (SEQ ID NO: | (SEQ ID | (SEQ ID |
| | ID NO: | ID NO: 293) | | 763) | NO: 998) | NO: 1233) |
| | 58) | | | | | |
| AB- | GTTFSDQF | RSRNKARSYTTEY | TRDGGEGGYTAFDI | RASQVITNDLG | ATSRLQS | LQDSNFPLT |
| 009328 | MD (SEQ | AASVKG (SEQ | (SEQ ID NO: 529) | (SEQ ID NO: | (SEQ ID | (SEQ ID |
| | ID NO: | ID NO: 294) | | 764) | NO: 999) | NO: 1234) |
| | 59) | | | | | |
| AB- | GGSISSSSY | SIYYSGSTYYNPSL | ARHKMGWLQFAGWFDP | QGDSLRSYYAS | GKNNRPS | NSRDSSGNHW |
| 009329 | YWG (SEQ | KS (SEQ ID | (SEQ ID NO: 530) | (SEQ ID NO: | (SEQ ID | V (SEQ ID |
| | ID NO: | NO: 295) | | 765) | NO: 1000) | NO: 1235) |
| | 60) | | | | | |
| AB- | GGSISSSSY | SIYYSGSTYYNPSL | ARHAMSGITIFGVVTNNNW | RASQSVSSNLA | GASTRAT | QQYNNWPPYT |
| 009330 | YWG (SEQ | KS (SEQ ID | FDP (SEQ ID NO: | (SEQ ID NO: | (SEQ ID | (SEQ ID |
| | ID NO: | NO: 296) | 531) | 766) | NO: 1001) | NO: 1236) |
| | 61) | | | | | |
| AB- | GFSLNTAG | HIDWEDEKFYSTS | ARNEWDFDAFDI (SEQ | TATSSDIGNYNY | EVSSRPS | SSYTTSRTYV |
| 009331 | MRVN (SEQ | LKT (SEQ ID | ID NO: 532) | VS (SEQ ID | (SEQ ID | (SEQ ID |
| | ID NO: | NO: 297) | | NO: 767) | NO: 1002) | NO: 1237) |
| | 62) | | | | | |
| AB- | TFIFNNYA | VISGSGSATYYADS | AKVRAGSGSHKAGYYFEK | RASESVSTWLA | KASNLES | QQYSTYST |
| 009332 | MS (SEQ | VKG (SEQ ID | (SEQ ID NO: 533) | (SEQ ID NO: | (SEQ ID | (SEQ ID |
| | ID NO: | NO: 298) | | 768) | NO: 1003) | NO: 1238) |
| | 63) | | | | | |
| AB- | GGSFAGYY | EINHSGGTNYNPFL | VRDSDMTLAAYYKGFQYG | RTSQIVGVNLA | GASTRAT | QQYDNWPRT |
| 009333 | WS (SEQ | KS (SEQ ID | MDV (SEQ ID NO: | (SEQ ID NO: | (SEQ ID | (SEQ ID |
| | ID NO: | NO: 299) | 534) | 769) | NO: 1004) | NO: 1239) |
| | 64) | | | | | |
| AB- | GGSITSRFD | SISHGGNTYYTPSL | ARAYCSGGSCYVYYYFYVD | SGSSSNIGSNFVH | RNNERPS | AAWDDTLSSP |
| 009334 | YWV (SEQ | KS (SEQ ID | V (SEQ ID NO: 535) | (SEQ ID NO: | (SEQ ID | NWV (SEQ |
| | ID NO: | NO: 300) | | 770) | NO: 1005) | ID NO: |
| | 65) | | | | | 1240) |
| AB- | GGSISSHY | YIYYSGSTNYNPSL | ARVRREWLAAYFYYGMDV | RASQGISNYLA | AASTLQS | QKYNSAPLT |
| 009335 | WS (SEQ | KS (SEQ ID | (SEQ ID NO: 536) | (SEQ ID NO: | (SEQ ID | (SEQ ID |
| | ID NO: | NO: 301) | | 771) | NO: 1006) | NO: 1241) |
| | 66) | | | | | |
| AB- | GFSFSSYA | VISFDQTTKYYAD | ARQEDYDYVWGIFRPRGWY | RASQSLGSSYLA | GASTRAT | QQYDSPPPYT |
| 009336 | MH (SEQ | SVKG (SEQ ID | IDL (SEQ ID NO: | (SEQ ID NO: | (SEQ ID | (SEQ ID |
| | ID NO: | NO: 302) | 537) | 772) | NO: 1007) | NO: 1242) |
| | 67) | | | | | |
| AB- | GFTFSSYA | AISGSGGSTYYADS | AKTTGVTMIVVVIEGGYFD | RASQSVSSNLA | GASTRAT | QQYNNWLSYT |
| 009337 | MS (SEQ | VKG (SEQ ID | Y (SEQ ID NO: 538) | (SEQ ID NO: | (SEQ ID | (SEQ ID |
| | ID NO: | NO: 303) | | 773) | NO: 1008) | NO: 1243) |
| | 68) | | | | | |
| AB- | GFTFSSYG | VIWYDGSNKYCA | AREAKPAGGRSFTIFGVAT | TGTSSDVGGYN | DVSNRPS | SSYTSSSTLI |
| 009338 | MH (SEQ | DSVKG (SEQ | YYYYMDV (SEQ ID NO: | YVS (SEQ ID | (SEQ ID | (SEQ ID |
| | ID NO: | ID NO: | 539) | NO: 774) | NO: 1009) | NO: 1244) |
| | 69) | 304) | | | | |
| AB- | GGSISSHY | YIYYSGSTNYNPSL | ARAPRGWLQLSPYYFDL | RASQSVSSSYLA | GASSRAT | HQYGSSPT |
| 009339 | WS (SEQ | KS (SEQ ID | (SEQ ID NO: 540) | (SEQ ID NO: | (SEQ ID | (SEQ ID |
| | ID NO: | NO: 305) | | 775) | NO: 1010) | NO: 1245) |
| | 70) | | | | | |
| AB- | GYTLTELS | GFDPEDGETIYAQ | ATAFAYCGGDCYYPSY | TGTSSDVGGYN | DVSKRPS | CSYAGSSSPW |
| 009340 | MH (SEQ | KFQG (SEQ ID | (SEQ ID NO: 541) | YVS (SEQ ID | (SEQ ID | V (SEQ ID |
| | ID NO: | NO: 306) | | NO: 776) | NO: 1011) | NO: 1246) |
| | 71) | | | | | |
| AB- | GGSISSSSY | SIYYSGSTYYNPSL | ARQMPNRPMIVVVTIRGWF | RASQSVSSNLA | GASTRAT | QQYNNWPRT |
| 009341 | YWG (SEQ | KS (SEQ ID | DP (SEQ ID NO: 542) | (SEQ ID NO: | (SEQ ID | (SEQ ID |
| | ID NO: | NO: 307) | | 777) | NO: 1012) | NO: 1247) |
| | 72) | | | | | |
| AB- | GFTFSTYA | AISGGGHFTYYAD | AKDPRLVTTGWYYDL | RASQSVSSNLA | GASTRAT | QQYHNWPPA |
| 009342 | MS (SEQ | SVEG (SEQ ID | (SEQ ID NO: 543) | (SEQ ID NO: | (SEQ ID | (SEQ ID |
| | ID NO: | NO: 308) | | 778) | NO: 1013) | NO: 1248) |
| | 73) | | | | | |
| AB- | GFTFNNHG | VISYEGSKKDYAD | AKDAAIFMIYPSRYFDL | SGYILGDVSAS | QDTKRPS | QAWDSRTHVV |
| 009343 | MH (SEQ | SVKG (SEQ ID | (SEQ ID NO: 544) | (SEQ ID NO: | (SEQ ID | (SEQ ID |
| | ID NO: | NO: 309) | | 779) | NO: 1014) | NO: 1249) |
| | 74) | | | | | |
| AB- | GFTFSSYS | SISSSSSYIYYADSV | ARGWYQLLLPYYYMDV | RASQSVSSSYLA | GASSRAT | QQYGSSPPKY |
| 009344 | MN (SEQ | KG (SEQ ID NO: | (SEQ ID NO: 545) | (SEQ ID NO: | (SEQ ID | T (SEQ ID |
| | ID NO: | 310) | | 780) | NO: 1015) | NO: 1250) |
| | 75) | | | | | |
| AB- | GFSFSTYA | FMSYDGRNEYYA | ARVPGGVLGTFDI (SEQ | RASQSISTYLN | AASSLQS | QQSYSAPPT |
| 009345 | MH (SEQ | DSVKG (SEQ | ID NO: 546) | (SEQ ID NO: | (SEQ ID | (SEQ ID |
| | ID NO: | ID NO: 311) | | 781) | NO: 1016) | NO: 1251) |
| | 76) | | | | | |
| AB- | GFTFDDYG | GINWNGGSTGYAD | ARWPLLGISGYYHYYMDV | TGTSSDVGGYN | DVSKRPS | CSYAGSYTLL |
| 009346 | MS (SEQ | SVKG (SEQ ID | (SEQ ID NO: 547) | YVS (SEQ ID | (SEQ ID | (SEQ ID |
| | ID NO: | NO: 312) | | NO: 782) | NO: 1017) | NO: 1252) |
| | 77) | | | | | |
| AB- | SFIFSRYAM | TISSNGSNTYYAKS | ARSPGLAIHSSTSLDV | TLSSGYYSYKVD | VGTGGIV | GADHGSGGNF |
| 009347 | H (SEQ ID | VKD (SEQ ID | (SEQ ID NO: 548) | (SEQ ID NO: | KAKGD | VWV (SEQ |
| | NO: 78) | NO: 313) | | 783) | (SEQ ID | ID NO: |
| | | | | | NO: 1018) | 1253) |
| AB- | GFSLSNAR | HIFSNDEKSYSTSL | ARIRAQWLTFYYYMDV | RASQSVSSSYLA | GASSRAT | QQYGSSPPYT |
| 009348 | MGVS | KS (SEQ ID | (SEQ ID NO: 549) | (SEQ ID NO: | (SEQ ID | (SEQ ID |
| | (SEQ ID | NO: 314) | | 784) | NO: 1019) | NO: 1254) |
| | NO: 79) | | | | | |
| AB- | GFSFSTHG | AIWYDGSNENYAD | ARNHIPGSSLGFDP | RASQGISSRLA | ASSTLQS | QQASSLPYT |
| 009349 | MH (SEQ | SVRG (SEQ ID | (SEQ ID NO: 550) | (SEQ ID NO: | (SEQ ID | (SEQ ID |
| | ID NO: | NO: 315) | | 785) | NO: 1020) | NO: 1255) |
| | 80) | | | | | |
| AB- | GFIIDDYA | FIRSKTYGGTTEYA | TKDGRYDWNFILDSYYYYY | QGDSLRRYYAS | GKNKRPS | NSRDTSGDHR |
| 009350 | MS (SEQ | ASVKG (SEQ ID | MDV (SEQ ID NO: | (SEQ ID NO: | (SEQ ID | V (SEQ ID |
| | ID NO: | NO: 316) | 551) | 786) | NO: 1021) | NO: 1256) |
| | 81) | | | | | |
| AB- | GGTLSTYA | RITPIFGTTNYAQK | ARGASGWFGMDV (SEQ | GKNNIESESVH | DDSDRPS | QVWDSTGVH |
| 009351 | IS (SEQ | FQG (SEQ ID | ID NO: 552) | (SEQ ID NO: | (SEQ ID | VV (SEQ ID |
| | ID NO: | NO: 317) | | 787) | NO: 1022) | NO: 1257) |
| | 82) | | | | | |
| AB- | GYMFSKFG | WITPYNSDTVYAQ | ARDPWRDCSSC (SEQ | RASQNVGENFA | GKSIRAT | QQYDLFPWT |
| 009352 | IS (SEQ | NFQG (SEQ ID | ID NO: 553) | (SEQ ID NO: | (SEQ ID | (SEQ ID |
| | ID NO: | NO: 318) | | 788) | NO: 1023) | NO: 1258) |
| | 83) | | | | | |
| AB- | GYAFGSSD | WMHPDSGNTVYA | ARGPRLVRFLQWSLNYMDV | RASQSVSNSYLA | GASSRAT | QQYGSSRGIT |
| 009353 | IN (SEQ | QNFQD (SEQ | (SEQ ID NO: 554) | (SEQ ID NO: | (SEQ ID | (SEQ ID |
| | ID NO: | ID NO: 319) | | 789) | NO: 1024) | NO: 1259) |
| | 84) | | | | | |
| AB- | GFNFSNYG | AISGGGDGASYAD | AKIAD (SEQ ID | KSSQSLLHSDGK | EVSNRFS | MQSIQLPLT |
| 009354 | MS (SEQ | SVKG (SEQ ID | NO: 555) | TFLY (SEQ ID | (SEQ ID | (SEQ ID |
| | ID NO: | NO: 320) | | NO: 790) | NO: 1025) | NO: 1260) |
| | 85) | | | | | |
| AB- | SGSIRSSNY | SVYDSGRTEYNPS | ARHAGPHMVRGVMRNNWF | RASQNIDTYLN | AASSLRS | QQSYSIPWT |
| 009355 | YWG (SEQ | LKS (SEQ ID | DP (SEQ ID NO: | (SEQ ID NO: | (SEQ ID | (SEQ ID |
| | ID NO: | NO: 321) | 556) | 791) | NO: 1026) | NO: 1261) |
| | 86) | | | | | |
| AB- | GYTFVDYA | WIHAGNGNTKDSE | AIAAAGTQVV (SEQ ID | RASQSVANNLA | TASTRAP | QQYYDWPPVT |
| 009356 | IH (SEQ | KFQG (SEQ ID | NO: 557) | (SEQ ID NO: | (SEQ ID | (SEQ ID |
| | ID NO: | NO: 322) | | 792) | NO: 1027) | NO: 1262) |
| | 87) | | | | | |
| AB- | GGSISSSSY | SIYYSGSTYYNPSL | ARHPLSSITIFGVVKREYY | RASQGISSWLA | AASSLQS | QQANSFPLL |
| 009357 | YWG (SEQ | KS (SEQ ID | FDY (SEQ ID NO: | (SEQ ID NO: | (SEQ ID | (SEQ ID |
| | ID NO: | NO: 323) | 558) | 793) | NO: 1028) | NO: 1263) |
| | 88) | | | | | |
| AB- | GYTFTSYY | IIKPSGAGTIYAQK | ARGGGVTDRDY (SEQ | TGNTNNIGGYA | GNSLPS | STWDSSLGAV |
| 009358 | VH (SEQ | FQG (SEQ ID | ID NO: 559) | VG (SEQ ID | (SEQ ID | L (SEQ ID |
| | ID NO: | NO: 324) | | NO: 794) | NO: 1029) | NO: 1264) |
| | 89) | | | | | |
| AB- | GYRYTNY | IIYPADSDTRYSPSF | ARSFEYCTGTTCQSWFDF | TGTSSNIGAGYG | DNTNRPS | HSYDTTLSGQ |
| 009359 | WVA (SEQ | QG (SEQ ID NO: | (SEQ ID NO: 560) | VH (SEQ ID | (SEQ ID | GV (SEQ ID |
| | ID NO: | 325) | | NO: 795) | NO: 1030) | NO: 1265) |
| | 90) | | | | | |
| AB- | GYTFTSYDI | WMNPNSGNTGYA | ARGRAYQLLFNYYYYMDV | SGDKLGDKYAC | QDSKRPS | QAWDSSTVV |
| 009360 | N (SEQ ID | QKFQG (SEQ ID | (SEQ ID NO: 561) | (SEQ ID NO: | (SEQ ID | (SEQ ID |
| | NO: 91) | NO: 326) | | 796) | NO: 1031) | NO: 1266) |
| AB- | GFIFNNYG | VLSGSSYIKYEADS | ARKGVGSQDYGLDV | SGSTSNIGSNFV | RNTQRPS | AAWDDSLSGG |
| 009361 | LT (SEQ | VRG (SEQ ID | (SEQ ID NO: 562) | Y (SEQ ID | (SEQ ID | V (SEQ ID |
| | ID NO: | NO: 327) | | NO: 797) | NO: 1032) | NO: 1267) |
| | 92) | | | | | |
| AB- | GYTFTSYY | IINPSGGSTSYAQK | ARDPTTVTTYDYYYGMDV | SGDALPKQYAY | KDSERPS | QSADSSGTFV |
| 009362 | MH (SEQ | FQG (SEQ ID | (SEQ ID NO: 563) | (SEQ ID NO: | (SEQ ID | V (SEQ ID |
| | ID NO: | NO: 328) | | 798) | NO: 1033) | NO: 1268) |
| | 93) | | | | | |
| AB- | GFTFSSFA | AIGGDGGATYYVD | ATPSPTRYS (SEQ ID | KSSQSVLYSSNN | WASTRQS | QQYHKTPHT |
| 009363 | MT (SEQ | SIKG (SEQ ID | NO: 564) | KNYLA (SEQ | (SEQ ID | (SEQ ID |
| | ID NO: | NO: 329) | | ID NO: 799) | NO: 1034) | NO: 1269) |
| | 94) | | | | | |
| AB- | GFTFSSYA | VISYDGSNKYYAD | ARDPDYYDSSSDAFDI | RSSQSLVHSDGN | KVSNRDS | MQGTHWPPW |
| 009364 | MH (SEQ | SVKG (SEQ ID | (SEQ ID NO: 565) | TYLN (SEQ ID | (SEQ ID | T (SEQ ID |
| | ID NO: | NO: 330) | | NO: 800) | NO: 1035) | NO: 1270) |
| | 95) | | | | | |
| AB- | GYTLTELS | GFDPEDAETIYAQ | ATALAVTGTSDSYYYYYGM | RSSQSLVHSDGN | KISNRFS | MQATQFPWT |
| 009609 | MH (SEQ | KFQG (SEQ ID | DV (SEQ ID NO: 566) | TYLS (SEQ ID | (SEQ ID | (SEQ ID |
| | ID NO: | NO: 331) | | NO: 801) | NO: 1036) | NO: 1271) |
| | 96) | | | | | |
| AB- | GFSLSTSG | RIDWDDDKYYSTS | AREGVATISLDY (SEQ | RASQSISSYLN | AASSLQS | QQSYSTPRT |
| 009611 | MCVS | LKT (SEQ ID | ID NO: 567) | (SEQ ID NO: | (SEQ ID | (SEQ ID |
| | (SEQ ID | NO: 332) | | 802) | NO: 1037) | NO: 1272) |
| | NO: 97) | | | | | |
| AB- | GFSLSTSG | RIDWDDDKYYSTS | ARTQANRVAFDI (SEQ | RASQSISSYLN | AASSLQS | QQSYSTPRT |
| 009612 | MCVS | LKT (SEQ ID | ID NO: 568) | (SEQ ID NO: | (SEQ ID | (SEQ ID |
| | (SEQ ID | NO: 333) | | 803) | NO: 1038) | NO: 1273) |
| | NO: 98) | | | | | |
| AB- | GFTFSSYG | VISYDGSNKYYAD | AKDQKYYDILTGYYRSTYY | RASQSVSSNLA | GASTRAT | QQYNNWPPLT |
| 009614 | MH (SEQ | SVKG (SEQ ID | YYYYGMDV (SEQ ID | (SEQ ID NO: | (SEQ ID | (SEQ ID |
| | ID NO: | NO: 334) | NO: 569) | 804) | NO: 1039) | NO: 1274) |
| | 99) | | | | | |
| AB- | GFTFSSYG | VIWYDGSNKYYA | AKVGSPYCSGGSCYSGYFD | QASQDISNYLN | DASNLET | QQYDNLPPLT |
| 009615 | MH (SEQ | DSVKG (SEQ | Y (SEQ ID NO: 570) | (SEQ ID NO: | (SEQ ID | (SEQ ID |
| | ID NO: | ID NO: 335) | | 805) | NO: 1040) | NO: 1275) |
| | 100) | | | | | |
| AB- | GFTFSSYG | VISYDGSNKYYAD | AKSPEGAAAGTGYFDY | GGNNIGSKSVH | DDSDRPS | QVWDSSSDPW |
| 009616 | MH (SEQ | SVKG (SEQ ID | (SEQ ID NO: 571) | (SEQ ID NO: | (SEQ ID | V (SEQ ID |
| | ID NO: | NO: 336) | | 806) | NO: 1041) | NO: 1276) |
| | 101) | | | | | |
| AB- | GYTLIELS | GFDPEDGETIYAQ | ATGPAAATSGWFDP | TGTSSDVGGYN | DVSNRPS | SSYTSSSTRV |
| 009619 | MH (SEQ | KFQG (SEQ ID | (SEQ ID NO: 572) | YVS (SEQ ID | (SEQ ID | (SEQ ID |
| | ID NO: | NO: 337) | | NO: 807) | NO: 1042) | NO: 1277) |
| | 102) | | | | | |
| AB- | GFSLSTSG | LIYWDDDKRYSPS | AHHEVATVFDY (SEQ | TGTSSDVGAYN | EVSNRPS | SSYTSSSTV |
| 009620 | VGVG | LKS (SEQ ID | ID NO: 573) | YVS (SEQ ID | (SEQ ID | (SEQ ID |
| | (SEQ ID | NO: 338) | | NO: 808) | NO: 1043) | NO: 1278) |
| | NO: 103) | | | | | |
| AB- | GGSFSGYY | EINHSGSTNYNPSL | ARGTGIAVAGVLVNFYYCY | QGDSLRSYYAS | GKNNRPS | NSRDSSGNHL |
| 009629 | WS (SEQ | KS (SEQ ID | YMDV (SEQ ID NO: | (SEQ ID NO: | (SEQ ID | V (SEQ ID |
| | ID NO: | NO: 339) | 574) | 809) | NO: 1044) | NO: 1279) |
| | 104) | | | | | |
| AB- | GFNFSFYW | NIKQDGSEKYYVD | ARLSGGSWYFDY (SEQ | SGDKLGDKYAC | QDSKRPS | QAWDSSTGV |
| 009631 | MS (SEQ | SVKG (SEQ ID | ID NO: 575) | (SEQ ID NO: | (SEQ ID | (SEQ ID |
| | ID NO: | NO: 340) | | 810) | NO: 1045) | NO: 1280) |
| | 105) | | | | | |
| AB- | GGSISSYY | YIYYSGSTNYNPSL | ARGFDY (SEQ ID | RASQSVGSIYLA | GASSRAT | QQYGSSLTWT |
| 009633 | WS (SEQ | KS (SEQ ID | NO: 576) | (SEQ ID NO: | (SEQ ID | (SEQ ID |
| | ID NO: | NO: 341) | | 811) | NO: 1046) | NO: 1281) |
| | 106) | | | | | |
| AB- | GFSLSTSG | RIDWDDDKFYSTS | ARYYYYGMDV (SEQ | KSSQSVLYSSNN | WASTRES | QQYYSTLWT |
| 009634 | MRVS | LKT (SEQ ID | ID NO: 577) | KNYLA (SEQ | (SEQ ID | (SEQ ID |
| | (SEQ ID | NO: 342) | | ID NO: 812) | NO: 1047) | NO: 1282) |
| | NO: 107) | | | | | |
| AB- | GFTFSNAW | RIKSKTDGGTTDY | TTGRYYYDSSGYANDAFDI | SGDALPKKYAY | EDSKRPS | YSTDSSGNHR |
| 009635 | MS (SEQ | AAPVKG (SEQ | (SEQ ID NO: 578) | (SEQ ID NO: | (SEQ ID | V (SEQ ID |
| | ID NO: | ID NO: 343) | | 813) | NO: 1048) | NO: 1283) |
| | 108) | | | | | |
| AB- | GGTFSSYAI | GIIPILGTANYAQK | AREGGFYGSGRNFDY | RSSQSLLHSNGY | LGSNRAS | MQALQTPYT |
| 009637 | S (SEQ ID | FQG (SEQ ID | (SEQ ID NO: 579) | NYLD (SEQ ID | (SEQ ID | (SEQ ID |
| | NO: 109) | NO: 344) | | NO: 814) | NO: 1049) | NO: 1284) |
| AB- | GFTFSDYY | YISSSGSTIYYADS | ARDSTRYCSSTSCSSYYYG | SGDALPKQYAY | KDSERPS | QSADSSGTWV |
| 009638 | MS (SEQ | VKG (SEQ ID | MDV (SEQ ID NO: | (SEQ ID NO: | (SEQ ID | (SEQ ID |
| | ID NO: | NO: 345) | 580) | 815) | NO: 1050) | NO: 1285) |
| | 110) | | | | | |
| AB- | GFTFSSYA | VISYDGSNKYYAD | ARDSDDYGDYYFDY | RSSQSLVHSDGN | KVSNRDS | MQGTHWPPW |
| 009640 | MH (SEQ | SVKG (SEQ ID | (SEQ ID NO: 581) | TYLN (SEQ ID | (SEQ ID | T (SEQ ID |
| | ID NO: | NO: 346) | | NO: 816) | NO: 1051) | NO: 1286) |
| | 111) | | | | | |
| AB- | GGSFSGYS | EINHSGSTNYNPSL | AREGRFLEWLLGVNYYYY | QGDSLRSYYAS | GKNNRPS | HSRDSSGNHL |
| 009642 | WS (SEQ | KS (SEQ ID | MDV (SEQ ID NO: | (SEQ ID NO: | (SEQ ID | V (SEQ ID |
| | ID NO: | NO: 347) | 582) | 817) | NO: 1052) | NO: 1287) |
| | 112) | | | | | |
| AB- | GFTFGDYA | FIRSKAYGGTTEY | TREDFWSGYSDY (SEQ | RASQSISSWLA | KASSLES | QQYNSYPWT |
| 009643 | MS (SEQ | AASVKG (SEQ | ID NO: 583) | (SEQ ID NO: | (SEQ ID | (SEQ ID |
| | ID NO: | ID NO: 348) | | 818) | NO: 1053) | NO: 1288) |
| | 113) | | | | | |
| AB- | GFTFSSYG | VISYDGSNKYYAD | AKDPGITIFGVVYYYYMDV | RASQSISSYLN | AASSLQS | QQSYSTPHT |
| 009644 | MH (SEQ | SVKG (SEQ ID | (SEQ ID NO: 584) | (SEQ ID NO: | (SEQ ID | (SEQ ID |
| | ID NO: | NO: 349) | | 819) | NO: 1054) | NO: 1289) |
| | 114) | | | | | |
| AB- | GFTFSSYA | VISYDGSNKYYAD | ARACSSTSCYKGDAFDI | SGDALPKQYAY | KDSERPS | QSADSSGTYS |
| 009646 | MH (SEQ | SVKG (SEQ ID | (SEQ ID NO: 585) | (SEQ ID NO: | (SEQ ID | WV (SEQ ID |
| | ID NO: | NO: 350) | | 820) | NO: 1055) | NO: 1290) |
| | 115) | | | | | |
| AB- | GYTFAGYD | WASTKNDNTGYA | ARGVDQGVDY (SEQ ID | TLRSGINVDSYR | YKSAADK | MIWHNSAYF |
| 009647 | IN (SEQ | QKFQG (SEQ | NO: 586) | IY (SEQ ID | EQGS | (SEQ ID |
| | ID NO: | ID NO: 351) | | NO: 821) | (SEQ ID | NO: 1291) |
| | 116) | | | | NO: 1056) | |
| AB- | GFTFSSYW | NIKQDGSEKYYVD | ARDFNDFWSGYYGPSFDY | SGDKLGDKYAC | QDSKRPS | QAWDSSTGV |
| 009649 | MS (SEQ | SVKG (SEQ ID | (SEQ ID NO: 587) | (SEQ ID NO: | (SEQ ID | (SEQ ID |
| | ID NO: | NO: 352) | | 822) | NO: 1057) | NO: 1292) |
| | 117) | | | | | |
| AB- | GFTFSSYA | VISYDGSNKYYAD | ARVWVPKVYYYGMDV | QASQDISNYLN | DASNLET | QQYDNLPIT |
| 009650 | MH (SEQ | SVKG (SEQ ID | (SEQ ID NO: 588) | (SEQ ID NO: | (SEQ ID | (SEQ ID |
| | ID NO: | NO: 353) | | 823) | NO: 1058) | NO: 1293) |
| | 118) | | | | | |
| AB- | GGSFSGYY | EINHSGSTNYNPSL | ARSWSSWSYAFDI (SEQ | TGTSSDVGSYNL | EGSKRPS | CSYAGSSTWV |
| 009654 | WS (SEQ | KS (SEQ ID | ID NO: 589) | VS (SEQ ID | (SEQ ID | (SEQ ID |
| | ID NO: | NO: 354) | | NO: 824) | NO: 1059) | NO: 1294) |
| | 119) | | | | | |
| AB- | GFTFSSYW | NIKQDGSEKYYVD | ARDSSDPIGAFDI (SEQ | SGDKLGDKYAC | QDSKRPS | QAWDSSTVV |
| 009655 | MS (SEQ | SVKG (SEQ ID | ID NO: 590) | (SEQ ID NO: | (SEQ ID | (SEQ ID |
| | ID NO: | NO: 355) | | 825) | NO: 1060) | NO: 1295) |
| | 120) | | | | | |
| AB- | GFTFSSYS | SISSSSSYIYYADSV | ATIPAAMESAYYYYGMDV | SGDKLGDKYAC | QDSKRPS | QAWDSSTVV |
| 009657 | MN (SEQ | KG (SEQ ID NO: | (SEQ ID NO: 591) | (SEQ ID NO: | (SEQ ID | (SEQ ID |
| | ID NO: | 356) | | 826) | NO: 1061) | NO: 1296) |
| | 121) | | | | | |
| AB- | GFTFSSYA | AISGSGGSTYYADS | AKRLDY (SEQ ID | RSSQSLVHSDGN | KISNRFS | TQATQFPWT |
| 009659 | MS (SEQ | VKG (SEQ ID | NO: 592) | TYLS (SEQ ID | (SEQ ID | (SEQ ID |
| | ID NO: | NO: 357) | | NO: 827) | NO: 1062) | NO: 1297) |
| | 122) | | | | | |
| AB- | GFTFSSYG | VISYDGSNKYYAD | AKDYGDYGGMDV (SEQ | KSSQSVLYSSNN | WASTRES | QQYYSTPR |
| 009661 | MH (SEQ | SVKG (SEQ ID | ID NO: 593) | KNYLA (SEQ | (SEQ ID | (SEQ ID |
| | ID NO: | NO: 358) | | ID NO: 828) | NO: 1063) | NO: 1298) |
| | 123)) | | | | | |
| AB- | GFSFRSFG | LITYDATEKHFGDS | VKDLGYKDN (SEQ ID | QGDSLRNYYAS | AQNNRPS | NSRDSSGDRL |
| 009664 | MH (SEQ | VKG (SEQ ID | NO: 594) | (SEQ ID NO: | (SEQ ID | V (SEQ ID |
| | ID NO: | NO: 359) | | 829) | NO: 1064) | NO: 1299) |
| | 124) | | | | | |
| AB- | GFTFSSYA | AISGSGGSTYYADS | AKHARRHDYGDYFDY | SGDKLGDKYAC | QDTKRPS | QAWDSSTAW |
| 009667 | MS (SEQ | VKG (SEQ ID | (SEQ ID NO: 595) | (SEQ ID NO: | (SEQ ID | V (SEQ ID |
| | ID NO: | NO: 360) | | 830) | NO: 1065) | NO: 1300) |
| | 125) | | | | | |
| AB- | GGSISSYY | YIYYSGSTYYNPSL | ARALRGIFGVVNWFDP | RASQSVSSNYLA | GASSRAT | QQYGSSPLT |
| 009671 | WS (SEQ | KS (SEQ ID | (SEQ ID NO: 596) | (SEQ ID NO: | (SEQ ID | (SEQ ID |
| | ID NO: | NO: 361) | | 831) | NO: 1066) | NO: 1301) |
| | 126) | | | | | |
| AB- | GGSFSGYY | EINHSGSTNYNPSL | ARLSRQWLVRPHIYYFDY | RASQSVSSYLN | AASSLQS | QQSYSTPRT |
| 009676 | WS (SEQ | KS (SEQ ID | (SEQ ID NO: 597) | (SEQ ID NO: | (SEQ ID | (SEQ ID |
| | ID NO: | NO: 362) | | 832) | NO: 1067) | NO: 1302) |
| | 127) | | | | | |
| AB- | GFSLSTSG | RIDWDDDKYYSTS | ARSPIAARAGGFDY | RASQSISSYLN | AASSLQS | QQSYSTPRT |
| 009677 | MCVS | LKT (SEQ ID | (SEQ ID NO: 598) | (SEQ ID NO: | (SEQ ID | (SEQ ID |
| | (SEQ ID | NO: 363) | | 833) | NO: 1068) | NO: 1303) |
| | NO: 128) | | | | | |
| AB- | GFTFSTYG | AIWYDGSNKYYA | ARRGVTISYYYMDV | GLSSGSVSTTYY | NTKTRSS | VLYMGSGIWV |
| 009680 | MH (SEQ | DSVKG (SEQ | (SEQ ID NO: 599) | (SEQ ID NO: | (SEQ ID | (SEQ ID |
| | ID NO: | ID NO: 364) | | 834)PS | NO: 1069) | NO: 1304) |
| | 129) | | | | | |
| AB- | GGTFSSYAI | GIIPIFGTANYAQK | ASVGGDYDLDY (SEQ | RASQSVSSYLA | DASNRAT | QQRSNWPPYT |
| 009681 | S (SEQ ID | FQG (SEQ ID | ID NO: 600) | (SEQ ID NO: | (SEQ ID | (SEQ ID |
| | NO: 130) | NO: 365) | | 835) | NO: 1070) | NO: 1305) |
| AB- | GGSISSYY | YIYYSGSTNYNPSL | ARGATIFGVVIRPFDY | RASQSVSSSYLA | GASSRAT | QQYGSSPLT |
| 009682 | WS (SEQ | KS (SEQ ID | (SEQ ID NO: 601) | (SEQ ID NO: | (SEQ ID | (SEQ ID |
| | ID NO: | NO: 366) | | 836) | NO: 1071) | NO: 1306) |
| | 131) | | | | | |
| AB- | GGSISSSSY | SIYYSGSTYYNPSL | ARHTFGITIFGVVTRTGFD | RASQSISSYLN | AASSLQS | QQSYSTPYT |
| 009687 | YWG (SEQ | KS (SEQ ID | P (SEQ ID NO: 602) | (SEQ ID NO: | (SEQ ID | (SEQ ID |
| | ID NO: | NO: 367) | | 837) | NO: 1072) | NO: 1307) |
| | 132) | | | | | |
| AB- | GFTFSSYA | VISYDGSNKYYAD | AREMGSGMDV (SEQ ID | SGDKLGDKYAC | QDSKRPS | QAWDSSTGV |
| 009689 | MH (SEQ | SVKG (SEQ ID | NO: 603) | (SEQ ID NO: | (SEQ ID | (SEQ ID |
| | ID NO: | NO: 368) | | 838) | NO: 1073) | NO: 1308) |
| | 133) | | | | | |
| AB- | RFSTSENY | RSKNRASSFATEY | AGSIAVAGAI (SEQ ID | RSSQSLLHSNGY | FGSNRAS | MQSLQTPVT |
| 009691 | VD (SEQ | AASVKG (SEQ | NO: 604) | NYLV (SEQ ID | (SEQ ID | (SEQ ID |
| | ID NO: | ID NO: 369) | | NO: 839) | NO: 1074) | NO: 1309) |
| | 134) | | | | | |
| AB- | GFTFSSYA | VISYDGSNKYYAD | ARARGGNYYYGMDV | RASQSISSWLA | KASSLES | QQYNSYSWT |
| 009695 | MH (SEQ | SVKG (SEQ ID | (SEQ ID NO: 605) | (SEQ ID NO: | (SEQ ID | (SEQ ID |
| | ID NO: | NO: 370) | | 840) | NO: 1075) | NO: 1310) |
| | 135) | | | | | |
| AB- | GGSISSSSY | SIYYSGSTYYNPSL | ASREVVLRYFDWSSPMGGF | TGTSSDVGGYN | DVSNRPS | SSYTSSSTVV |
| 009697 | YWG (SEQ | KS (SEQ ID | DP (SEQ ID NO: 606) | YVS (SEQ ID | (SEQ ID | (SEQ ID |
| | ID NO: | NO: 371) | | NO: 841) | NO: 1076) | NO: 1311) |
| | 136) | | | | | |
| AB- | GFTLNTYA | SSSGTGATTNYAD | VRDGYNMIPFDM (SEQ | GASRSLGSNYLA | GAFHRAN | QQYNSSPYT |
| 009703 | MS (SEQ | SVNG (SEQ ID | ID NO: 607) | (SEQ ID NO: | (SEQ ID | (SEQ ID |
| | ID NO: | NO: 372) | | 842) | NO: 1077) | NO: 1312) |
| | 137) | | | | | |
| AB- | GGSFSGYY | EINHAGSLSYNPSL | VRWGPVGNTWAFDY | TLSSEHSTYTID | IKSDGSHI | GQSHTNNGQA |
| 009706 | WS (SEQ | KS (SEQ ID | (SEQ ID NO: 608) | (SEQ ID NO: | KGG (SEQ | GVV (SEQ |
| | ID NO: | NO: 373) | | 843) | ID NO: | ID NO: |
| | 138) | | | | 1078) | 1313) |
| AB- | GDSIYSDY | EVYRSGTRQYSPS | AAMRDGYGSGWL (SEQ | GLSSGSVSAHYF | RTNTRSS | ALSMNSGSFW |
| 009707 | WWT (SEQ | LES (SEQ ID | ID NO: 609) | PT (SEQ ID | (SEQ ID | V (SEQ ID |
| | ID NO: | NO: 374) | | NO: 844) | NO: 1079) | NO: 1314) |
| | 139) | | | | | |
| AB- | GGSLGGYY | ESDESGKTDYNPS | ARGHTSIYGVLIMLFHASW | KSSQSVLYNSNN | WASTRTS | QQYYTSPRT |
| 009708 | WT (SEQ | LKS (SEQ ID | LDP (SEQ ID NO: | KDYLA (SEQ | (SEQ ID | (SEQ ID |
| | ID NO: | NO: 375) | 610) | ID NO: 845) | NO: 1080) | NO: 1315) |
| | 140) | | | | | |
| AB- | GFVFRRYW | RTNEDGTITNYAD | ARDVGGADGH (SEQ ID | RSSESLVHPNGK | SASIRAS | MQGLQTPYT |
| 009709 | MH (SEQ | SVKG (SEQ ID | NO: 611) | TWLD (SEQ ID | (SEQ ID | (SEQ ID |
| | ID NO: | NO: 376) | | NO: 846) | NO: 1081) | NO: 1316) |
| | 141) | | | | | |
| AB- | GGSYSSYT | RISPVLNTTYYAQ | ARLASMNGVDI (SEQ | RASQSVYGSYLA | GGSSRAT | HQYGTSRYS |
| 009710 | LS (SEQ | KLEG (SEQ ID | ID NO: 612) | (SEQ ID NO: | (SEQ ID | (SEQ ID |
| | ID NO: | NO: 377) | | 847) | NO: 1082) | NO: 1317) |
| | 142) | | | | | |
| AB- | GYTFTHYY | RINPNSGGTHYAQ | ARDSETDTSLAVAYYYYYM | RASQSVAGSSFG | GASTRAT | QQYDKSPIT |
| 009711 | IH (SEQ | KFQG (SEQ ID | DV (SEQ ID NO: 613) | GSYLA (SEQ | (SEQ ID | (SEQ ID |
| | ID NO: | NO: 378) | | ID NO: 848) | NO: 1083) | NO: 1318) |
| | 143) | | | | | |
| AB- | QFIFSSYA | MIYSDSSEKHYAD | AREGREYSDNSGKRGYFDS | RASQSIRNWLA | DASNLKS | QQYILYWT |
| 009712 | MH (SEQ | SVKG (SEQ ID | (SEQ ID NO: 614) | (SEQ ID NO: | (SEQ ID | (SEQ ID |
| | ID NO: | NO: 379) | | 849) | NO: 1084) | NO: 1319) |
| | 144) | | | | | |
| AB- | GFTLRTYA | IISYSGDTEYDAGS | AREGEDYSSSYFDH | TLSSGYSTYAIA | LNSDGSH | QTWGSGIQV |
| 009713 | MH (SEQ | VRG (SEQ ID | (SEQ ID NO: 615) | (SEQ ID NO: | TKGD | (SEQ ID |
| | ID NO: | NO: 380) | | 850) | (SEQ ID | NO: 1320) |
| | 145) | | | | NO: 1085) | |
| AB- | GGSFSYYS | EIIHRGRTNSNPSL | ARHRIVEATFSRYDYFDS | QGDSLRTYYAT | AKNSRPS | NSRDSSGNYV |
| 009714 | WSWS | KS (SEQ ID | (SEQ ID NO: 616) | (SEQ ID NO: | (SEQ ID | (SEQ ID |
| | (SEQ ID | NO: 381) | | 851) | NO: 1086) | NO: 1321)V |
| | NO: 146) | | | | | |
| AB- | GGSFNNHA | EVIPHGSTKCDPSL | ARRSGESNGWGTYYHYGM | ASSTGAVTSGYY | NTNYRHS | LLYYGGAQPW |
| 009715 | WT (SEQ | KS (SEQ ID | DV (SEQ ID NO: | PI (SEQ ID | (SEQ ID | V (SEQ ID |
| | ID NO: | NO: 382) | 617) | NO: 852) | NO: 1087) | NO: 1322) |
| | 147) | | | | | |
| AB- | GGSFTNYW | EIDRSGTTNYSPSL | ARGRTPTGTFDYYSYLDV | QGDSLRSYYAS | GKNSRPS | NSRDSSGNSV |
| 009716 | WRWT | KS (SEQ ID | (SEQ ID NO: 618) | (SEQ ID NO: | (SEQ ID | V (SEQ ID |
| | (SEQ ID | NO: 383) | | 853) | NO: 1088) | NO: 1323) |
| | NO: 148) | | | | | |
| AB- | GGSFSGYY | EITHSGRTNYNPSL | ARWDCTDGTCYAVY | SGDELGRKYVS | RDNRRPS | QAWDSTTVI |
| 009717 | WS (SEQ | TR (SEQ ID | (SEQ ID NO: 619) | (SEQ ID NO: | (SEQ ID | (SEQ ID |
| | ID NO: | NO: 384) | | 854) | NO: 1089) | NO: 1324) |
| | 149) | | | | | |
| AB- | GGSFSNYY | EINYRGNTKYNPS | ARGLGPPVGSLAITFGGLR | RASQSISSYLN | AASTLQS | QQSYSAPFT |
| 009718 | WN (SEQ | LRS (SEQ ID | RSFDI (SEQ ID | (SEQ ID NO: | (SEQ ID | (SEQ ID |
| | ID NO: | NO: 385) | NO: 620) | 855) | NO: 1090) | NO: 1325) |
| | 150) | | | | | |
| AB- | GYTLSKLF | GSVPEDDNTIYAE | ATFRRQRGGYYYYGLDL | QASQDISNYLN | DASNLET | QQADNLPYT |
| 009719 | MH (SEQ | KFRG (SEQ ID | (SEQ ID NO: 621) | (SEQ ID NO: | (SEQ ID | (SEQ ID |
| | ID NO: | NO: 386) | | 856) | NO: 1091) | NO: 1326) |
| | 151) | | | | | |
| AB- | GFKFDDYA | GISWNSGSIDYADS | AKVKLTVFGVEQSPLDS | RSSQSLLHNDGY | LGFHRAS | VQALQTPLT |
| 009720 | MH (SEQ | VKG (SEQ ID | (SEQ ID NO: 622) | NYLD (SEQ ID | (SEQ ID | (SEQ ID |
| | ID NO: | NO: 387) | | NO: 857) | NO: 1092) | NO: 1327) |
| | 152) | | | | | |
| AB- | GFTFSRYA | TISDTDGSTIYYTD | TIQARVPSAMKVYFQN | TGSSSNIGAGYD | ANNNRPS | QSYDNSLSGS |
| 009721 | MA (SEQ | SVKG (SEQ ID | (SEQ ID NO: 623) | VH (SEQ ID | (SEQ ID | RV (SEQ ID |
| | ID NO: | NO: 388) | | NO: 858) | NO: 1093) | NO: 1328) |
| | 153) | | | | | |
| AB- | GGIFNSYKI | GIIAIFGTADYAQR | TRERFSNYFDP (SEQ | RASQSVSSFLG | DASNRAS | QQRSRGPSGI |
| 009722 | T (SEQ | FQG (SEQ ID | ID NO: 624) | (SEQ ID NO: | (SEQ ID | T (SEQ ID |
| | ID NO: | NO: 389) | | 859) | NO: 1094) | NO: 1329) |
| | 154) | | | | | |
| AB- | GYIFTNYD | WMNPYSGNTGFS | ARGRDVGQWLVGEGFDY | RASQDISSALA | DASSLEN | QQFNTYPLT |
| 009723 | LS (SEQ | QKFQG (SEQ | (SEQ ID NO: 625) | (SEQ ID NO: | (SEQ ID | (SEQ ID |
| | ID NO: | ID NO: 390) | | 860) | NO: 1095) | NO: 1330) |
| | 155) | | | | | |
| AB- | GGTFSNNA | RIIPMVGVADYAQ | ARGKPFDFWSGLFDS | KSSQTLLHSDGK | EVSNRFS | MQSIELPPLT |
| 009724 | IS (SEQ | KLQG (SEQ ID | (SEQ ID NO: 626) | TYLY (SEQ ID | (SEQ ID | (SEQ ID |
| | ID NO: | NO: 391) | | NO: 861) | NO: 1096) | NO: 1331) |
| | 156) | | | | | |
| AB- | HGSIRSQY | YIYDSGSSKYNPSL | ARRKVSFPRPSDDSSFDWF | QASQDISNFLN | DASILEA | QQYDNLAPLT |
| 009725 | WS (SEQ | KS (SEQ ID | FDL (SEQ ID NO: | (SEQ ID NO: | (SEQ ID | (SEQ ID |
| | ID NO: | NO: 392) | 627) | 862) | NO: 1097) | NO: 1332) |
| | 157) | | | | | |
| AB- | GYTFINYW | IIYPGDSDTRYSPSF | AREDIIENERGGFDI | SGDELPKQYAS | KDTERPS | QSPDSSDTYR |
| 009726 | IG (SEQ | QG (SEQ ID NO: | (SEQ ID NO: 628) | (SEQ ID NO: | (SEQ ID | V (SEQ ID |
| | ID NO: | 393) | | 863) | NO: 1098) | NO: 1333) |
| | 158) | | | | | |
| AB- | GFTFDNFG | VISHDGTNEYYGD | GRDRIALAEIDY (SEQ | RASQSVGNNVA | GASLRAT | QQYNNWPPSI |
| 009727 | FH (SEQ | SVKG (SEQ ID | ID NO: 629) | (SEQ ID NO: | (SEQ ID | T (SEQ ID |
| | ID NO: | NO: 394) | | 864) | NO: 1099) | NO: 1334) |
| | 159) | | | | | |
| AB- | GFNFNYYG | SISSSSSHIYYADSV | VRDRSFEYGDYGGDN | SGDALPNQYVY | KDKERPS | QSADSSGTYP |
| 009728 | MN (SEQ | KG (SEQ ID NO: | (SEQ ID NO: 630) | (SEQ ID NO: | (SEQ ID | NWV (SEQ |
| | ID NO: | 395) | | 865) | NO: 1100) | ID NO: |
| | 160) | | | | | 1335) |
| AB- | GYTFTDYY | WINPDTSATNYAQ | TRVPHYYGSDTYYKPWYYY | TGTSSDVGGYN | EVTNRPS | SSYTSVSTLM |
| 009729 | IH (SEQ | NFQG (SEQ ID | YAMDV (SEQ ID | YVS (SEQ ID | (SEQ ID | L (SEQ ID |
| | ID NO: | NO: 396) | NO: 631) | NO: 866) | NO: 1101) | NO: 1336) |
| | 161) | | | | | |
| AB- | GGTFSSYAI | EIIPVFGAPKFAQK | AVGYCSSSSCEPQDAFDI | KSSQSLLHSAGK | EVSNRFS | MQTIQLPIS |
| 009730 | S (SEQ ID | FRG (SEQ ID | (SEQ ID NO: 632) | TYLY (SEQ ID | (SEQ ID | (SEQ ID |
| | NO: 162) | NO: 397) | | NO: 867) | NO: 1102) | NO: 1337) |
| AB- | GYSLTSYA | WLNGGNGNTKYS | ARADHSTYWYGWFDP | SGSTSNIGSNYV | RNDQRPS | TSWDDSLNGP |
| 009731 | MH (SEQ | QKFQA (SEQ | (SEQ ID NO: 633) | F (SEQ ID | (SEQ ID | L (SEQ ID |
| | ID NO: | ID NO: 398) | | NO: 868) | NO: 1103) | NO: 1338) |
| | 163) | | | | | |
| AB- | GFTFDDYT | LISWDGGSKYYAD | VKDISSSPANYGFAI | RASQSISTFVN | DASSLQS | QQSFSTLLT |
| 009732 | MH (SEQ | SVMG (SEQ ID | (SEQ ID NO: 634) | (SEQ ID NO: | (SEQ ID | (SEQ ID |
| | ID NO: | NO: 399) | | 869) | NO: 1104) | 1NO: 339) |
| | 164) | | | | | |
| AB- | GGSISSTAN | CISYSGRTYDNPSL | ARHAGWFGEHLDY | RASQSVSSGYLA | GASSRAT | QQYGSSLTWT |
| 009733 | YWG (SEQ | KS (SEQ ID | (SEQ ID NO: 635) | (SEQ ID NO: | (SEQ ID | (SEQ ID |
| | ID NO: | NO: 400) | | 870) | NO: 1105) | NO: 1340) |
| | 165) | | | | | |
| AB- | GYTFTSHY | LINPSGSGTAYPQH | ARMERSGAFDL (SEQ | RASQTISSRYLA | GSSIRAT | QHYGSSPPMY |
| 009734 | MH (SEQ | FQG (SEQ ID | ID NO: 636) | (SEQ ID NO: | (SEQ ID | T (SEQ ID |
| | ID NO: | NO: 401) | | 871) | NO: 1106) | NO: 1341) |
| | 166) | | | | | |
| AB- | GGTFNSYA | TVLPIFDTTHSAQK | VGRYGSGNYEGY | TRSSGSIASNYV | EDNQRPS | QSYDSRNPQW |
| 009735 | FT (SEQ | FQG (SEQ ID | (SEQ ID NO: 637) | Q (SEQ ID | (SEQ ID | V (SEQ ID |
| | ID NO: | NO: 402) | | NO: 872) | NO: 1107) | NO: 1342) |
| | 167) | | | | | |
| AB- | GGTFVNFA | GIIPVFGATNYAQK | AKDLLSDRQDPS (SEQ | RSSESLVHTDGN | KVSNRDS | MQGTHWPWT |
| 009736 | IC (SEQ | FRG (SEQ ID | ID NO: 638) | TYLN (SEQ ID | (SEQ ID | (SEQ ID |
| | ID NO: | NO: 403) | | NO: 873) | NO: 1108) | NO: 1343) |
| | 168) | | | | | |
| AB- | GLALSNGR | HIFSNDAKSYSTSL | ASIDERLGILYWYFHL | RASQTFSSNLA | GASTRAT | QQYNDWPRT |
| 009737 | MGVS | KG (SEQ ID NO: | (SEQ ID NO: 639) | (SEQ ID NO: | (SEQ ID | (SEQ ID |
| | (SEQ ID | 404 | | 874) | NO: 1109) | NO: 1344) |
| | NO: 169) | | | | | |
| AB- | GGTFTNYA | GIIPVFGAPNYAQK | ARVGYCSTTGCDMGGLDY | RASQSISSTYLA | GASSRAT | QQYGVSPNT |
| 009738 | IN (SEQ | FQG (SEQ ID | (SEQ ID NO: 640) | (SEQ ID NO: | (SEQ ID | (SEQ ID |
| | ID NO: | NO: 405) | | 875) | NO: 1110) | NO: 1345) |
| | 170) | | | | | |
| AB- | GYTFTSYW | IIYPGDSDTRYSLA | ARLSAQRGNSGPAVY | GGNNIGRKSVH | DDTDRPS | QVWDSSSDHV |
| 009739 | IV (SEQ | FQG (SEQ ID | (SEQ ID NO: 641) | (SEQ ID NO: | (SEQ ID | V (SEQ ID |
| | ID NO: | NO: 406) | | 876) | NO: 1111) | NO: 1346) |
| | 171) | | | | | |
| AB- | GFTFSSYG | SISGSGGSPYYADS | AKSEETMTTVTTFFDY | TLSSGHSSYPIA | LNSDGSH | QTWGTATPW |
| 009740 | MN (SEQ | VKG (SEQ ID | (SEQ ID NO: 642) | (SEQ ID NO: | SKGD | V (SEQ ID |
| | ID NO: | NO: 407) | | 877) | (SEQ ID | NO: 1347) |
| | 172) | | | | NO: 1112) | |
| AB- | GFTFSSYA | LINGGGGRTYYTD | ERSVGY (SEQ ID | RTSQSIATYLN | AASSLHS | QQTYSAPYT |
| 009741 | MS (SEQ | SVKG (SEQ ID | NO: 643) | (SEQ ID NO: | (SEQ ID | (SEQ ID |
| | ID NO: | NO: 408) | | 878) | NO: 1113) | NO: 1348) |
| | 173) | | | | | |
| AB- | GITFEDYA | GISWNGANIGYAD | AKSTVTTLRRTYFDS | RASQGISNLLA | AASRLQS | QQANTFPPAL |
| 009742 | LH (SEQ | SVKG (SEQ ID | (SEQ ID NO: 644) | (SEQ ID NO: | (SEQ ID | L (SEQ ID |
| | ID NO: | NO: 409) | | 879) | NO: 1114) | NO: 1349) |
| | 174) | | | | | |
| AB- | GNTLSELYI | GFDPEDGETIYAQ | ATHDFGDSEGEY | GSSTGPVTSGRY | DTNTKYS | LLSYSGARV |
| 009743 | Y (SEQ ID | NFQG (SEQ ID | (SEQ ID NO: 645) | PY (SEQ ID | (SEQ ID | (SEQ ID |
| | NO: 175) | NO: 410) | | NO: 880) | NO: 1115) | NO: 1350) |
| AB- | GYTFTNYA | WINAGNGNTKYSQ | AKDQWADYHTTGDFEY | TGSSSDVGGYN | DVGKRPS | CSYAGTHTYI |
| 009744 | VH (SEQ | KFQG (SEQ ID | (SEQ ID NO: 646) | YVS (SEQ ID | (SEQ ID | L (SEQ ID |
| | ID NO: | NO: 411) | | NO: 881) | NO: 1116) | NO: 1351) |
| | 176) | | | | | |
| AB- | GFTFGDYA | FIRSKVYGETTEYA | TRDGRLLWFEESDWGDAFG | RSSQSLVYSDGN | RVSNWDS | MQGTHWPYT |
| 009745 | MN (SEQ | ASVKG (SEQ ID | I (SEQ ID NO: 647) | TYLN (SEQ ID | (SEQ ID | (SEQ ID |
| | ID NO: | NO: 412) | | NO: 882) | NO: 1117) | NO: 1352) |
| | 177) | | | | | |
| AB- | GASLISNSY | SIFYSGTTHYNPSL | ARLTVDRRLQGYYYYYYM | TGSSSNIGAGYD | DNTNRPS | QSYDNSLSGS |
| 009746 | YWG (SEQ | KS (SEQ ID | DV (SEQ ID NO: | VH (SEQ ID | (SEQ ID | L (SEQ ID |
| | ID NO: | NO: 413) | 648) | NO: 883) | NO: 1118) | NO: 1353) |
| | 178) | | | | | |
| AB- | GFTFSNYG | FIRYDGSNEYYAD | AKQGLLSNYYYGMDV | KSSQSVLYSSNN | WASTRES | QQYYSSVT |
| 009747 | MH (SEQ | SVKG (SEQ ID | (SEQ ID NO: 649) | KNYLT (SEQ | (SEQ ID | (SEQ ID |
| | ID NO: | NO: 414) | | ID NO: 884) | NO: 1119) | NO: 1354) |
| | 179) | | | | | |
| AB- | GFTFSSHG | FIRYDGSNKYYAD | AKDNYYDILTGYYRKYYYF | RASQGISNYLA | AASTLQS | QKYNSAPFT |
| 009748 | MH (SEQ | SVKG (SEQ ID | GMDV (SEQ ID NO: | (SEQ ID NO: | (SEQ ID | (SEQ ID |
| | ID NO: | NO: 415) | 650) | 885) | NO: 1120) | NO: 1355) |
| | 180) | | | | | |
| AB- | GGSISSYY | YIHYSGSTIYNPSL | ARTAGSDDSGYLPFDY | SGDALPKKYAS | EDTKRPS | YSTDSSGNHR |
| 009749 | WS (SEQ | KS (SEQ ID | (SEQ ID NO: 651) | (SEQ ID NO: | (SEQ ID | V (SEQ ID |
| | ID NO: | NO: 416) | | 886) | NO: 1121) | NO: 1356) |
| | 181) | | | | | |
| AB- | GGSISSSSY | SIYYSGSTYYNPSL | SRSPFSISIFGVVIRYGMD | RASQGISSYLA | AASTLQS | QQLNSYPRT |
| 009750 | YWG (SEQ | KS (SEQ ID | V (SEQ ID NO: 652) | (SEQ ID NO: | (SEQ ID | (SEQ ID |
| | ID NO: | NO: 417) | | 887) | NO: 1122) | NO: 1357) |
| | 182) | | | | | |
| AB- | GGSISSGD | YIYYSGSTYYNPSL | ARAITKITIFGVVIENFDY | RASQSVSSSYLA | GASSRAT | QQYGSSPLT |
| 009751 | YYWS (SEQ | KS (SEQ ID | (SEQ ID NO: 653) | (SEQ ID NO: | (SEQ ID | (SEQ ID |
| | ID NO: | NO: 418) | | 888) | NO: 1123) | NO: 1358) |
| | 183) | | | | | |
| AB- | GYTFTSYA | WINAGNGNTKYSQ | AREVFEAAAGMLLPYYYYY | QGDSLRSYYAS | GKNNRPS | NSRDSSGNHL |
| 009752 | MH (SEQ | KFQG (SEQ ID | MDV (SEQ ID NO: | (SEQ ID NO: | (SEQ ID | V (SEQ ID |
| | ID NO: | NO: 419) | 654) | 889) | NO: 1124) | NO: 1359) |
| | 184) | | | | | |
| AB- | GGSISSHC | YIYYSGSTNYNPSL | ARQRREWLGSYYYYGMDV | RASQSISSYLN | AASSLQS | QQSYSTPLT |
| 009753 | WN (SEQ | KS (SEQ ID | (SEQ ID NO: 655) | (SEQ ID NO: | (SEQ ID | (SEQ ID |
| | ID NO: | NO: 420) | | 890) | NO: 1125) | NO: 1360) |
| | 185) | | | | | |
| AB- | GGSISSSSY | IIYYSGSTYYNPSL | ARVYAGFLEWLSYFDY | QGDSLRSYYAS | GKNNRPS | NSRDSSGNHW |
| 009754 | YWG (SEQ | KS (SEQ ID | (SEQ ID NO: 656) | (SEQ ID NO: | (SEQ ID | V (SEQ ID |
| | ID NO: | NO: 421) | | 891) | NO: 1126) | NO: 1361) |
| | 186) | | | | | |
| AB- | GDSISSGA | YIYYSGSTYYNPSL | ARARRITIFGVVGDFGV | RASQSVSSSYLA | GASSRAT | QQYGSSPLT |
| 009755 | YYWS | KS (SEQ ID | (SEQ ID NO: 657) | (SEQ ID NO: | (SEQ ID | (SEQ ID |
| | (SEQ ID | NO: 422) | | 892) | NO: 1127) | NO: 1362) |
| | NO: 187) | | | | | |
| AB- | GFTFSSFA | AISGSGGSTYYADS | AKEERVYDILTGYDY | SGDALPKQYAY | KDTERPS | QSADSSGSSV |
| 009756 | MS (SEQ | VKG (SEQ ID | (SEQ ID NO: 658) | (SEQ ID NO: | (SEQ ID | V (SEQ ID |
| | ID NO: | NO: 423) | | 893) | NO: 1128) | NO: 1363) |
| | 188) | | | | | |
| AB- | GGSISSSSY | SIYYSGSTYYNPSL | ARLKNWNTIFGVVIMAPYY | RASQSVSSYLA | DASNRAT | QQRSKGIT |
| 009757 | YWG (SEQ | KS (SEQ ID | MDV (SEQ ID NO: | (SEQ ID NO: | (SEQ ID | (SEQ ID |
| | ID NO: | NO: 424) | 659) | 894) | NO: 1129) | NO: 1364) |
| | 189) | | | | | |
| AB- | GYTLTELS | GFDPEDGETIYAQ | ATGYYGSRFDP (SEQ | GGNNIGSKSVH | DDSDRPS | QVWDSSTDHP |
| 009758 | MH (SEQ | KFQA (SEQ ID | ID NO: 660) | (SEQ ID NO: | (SEQ ID | GVV (SEQ |
| | ID NO: | NO: 425) | | 895) | NO: 1130) | ID NO: |
| | 190) | | | | | 1365) |
| AB- | GGTFSSYAI | GIIPIFGTANYAQK | ARALVQGVYYYYMDV | RASQSVSSKLA | GASTRAT | QQYNNWPPYT |
| 009759 | S (SEQ ID | FQG (SEQ ID | (SEQ ID NO: 661) | (SEQ ID NO: | (SEQ ID | (SEQ ID |
| | NO: 191) | NO: 426) | | 896) | NO: 1131) | NO: 1366) |
| AB- | GYSFTSYW | IIYPGDSDTRYSPSF | ARSRSSDYFDY (SEQ | RASQSISSWLA | DASSLES | QQYNSYSRT |
| 009760 | IG (SEQ | QG (SEQ ID NO: | ID NO: 662) | (SEQ ID NO: | (SEQ ID | (SEQ ID |
| | ID NO: | 427) | | 897) | NO: 1132) | NO: 1367) |
| | 192) | | | | | |
| AB- | GFTFSSYA | AISGSGGSTYYADS | AKGPRSAPDYMDV | RASQSISSWLA | DASSLES | QQYNSYSGT |
| 009761 | MS (SEQ | VKG (SEQ ID | (SEQ ID NO: 663) | (SEQ ID NO: | (SEQ ID | (SEQ ID |
| | ID NO: | NO: 428) | | 898) | NO: 1133) | NO: 1368) |
| | 193) | | | | | |
| AB- | GFTFSDYY | YISRSGSTIYYVDS | ARDQRLWSTLGVYYYYYM | RASQSISSYLN | AASSLQS | QQSYSHPLT |
| 009762 | MS (SEQ | VKG (SEQ ID | DV (SEQ ID NO: | (SEQ ID NO: | (SEQ ID | (SEQ ID |
| | ID NO: | NO: 429) | 664) | 899) | NO: 1134) | NO: 1369) |
| | 194) | | | | | |
| AB- | GGSFSGYY | EINHSGSTNYNPSL | ARRAAPAWTWFGELSPFDY | RASQSINNWLA | KASSLES | QQYNSYSQYT |
| 009763 | WS (SEQ | KS (SEQ ID | (SEQ ID NO: 665) | (SEQ ID NO: | (SEQ ID | (SEQ ID |
| | ID NO: | NO: 430) | | 900) | NO: 1135) | NO: 1370) |
| | 195) | | | | | |
| AB- | GGSISSHY | YIYYSGSTNYNPSL | ARSARRWLQYGPDWYFDL | TGTSSDVGGYN | DVSKRPS | SSYAGSNNWV |
| 009764 | WS (SEQ | KS (SEQ ID | (SEQ ID NO: 666) | YVS (SEQ ID | (SEQ ID | (SEQ ID |
| | ID NO: | NO: 431) | | NO: 901) | NO: 1136) | NO: 1371) |
| | 196) | | | | | |
| AB- | GFTFSDYY | YISSSGNTIYYADS | ARDPPPRITIFGVGTRLGF | RASQSVSSNLA | GASTRAT | QQYNNWPPW |
| 009765 | MS (SEQ | VKG (SEQ ID | DY (SEQ ID NO: | (SEQ ID NO: | (SEQ ID | T (SEQ ID |
| | ID NO: | NO: 432) | 667) | 902) | NO: 1137) | NO: 1372) |
| | 197) | | | | | |
| AB- | GGSISRSSY | SIYYSGSTYYNPSL | ARQLLGIWGSYRYIDY | RASQGISSYLA | AASTLQS | QQLNSYPIT |
| 009766 | YWG (SEQ | KS (SEQ ID | (SEQ ID NO: 668) | (SEQ ID NO: | (SEQ ID | (SEQ ID |
| | ID NO: | NO: 433) | | 903) | NO: 1138) | NO: 1373) |
| | 198) | | | | | |
| AB- | GYSFTSYW | IIYPGDSDTRYSPSF | ASGRLHLGELLDY | TGTSSDVGGYN | DVSNRPS | SSYTSSSTLV |
| 009767 | IG (SEQ | QG (SEQ ID NO: | (SEQ ID NO: 669) | YVS (SEQ ID | (SEQ ID | V (SEQ ID |
| | ID NO: | 434) | | NO: 904) | NO: 1139) | NO: 1374) |
| | 199) | | | | | |
| AB- | GGSISSSSY | SIYYSGSTYYNPSL | ARQPRRITIFGVVIMPTNN | TGSSSNIGAGYD | GNSNRPS | QSYDSSLSDV |
| 009768 | YWG (SEQ | KS (SEQ ID | WFDP (SEQ ID NO: | VH (SEQ ID | (SEQ ID | V (SEQ ID |
| | ID NO: | NO: 435) | 670) | NO: 905) | NO: 1140) | NO: 1375) |
| | 200) | | | | | |
| AB- | GFTFSSYW | NIKQDGSEKYYVD | ARSPEVLWFGDPVLDNWFD | SGDALPKQYAY | KDSERPS | QSADSSGTYP |
| 009769 | MS (SEQ | SVKG (SEQ ID | P (SEQ ID NO: 671) | (SEQ ID NO: | (SEQ ID | VV (SEQ ID |
| | ID NO: | NO: 436) | | 906) | NO: 1141) | NO: 1376) |
| | 201) | | | | | |
| AB- | GFTFSSYS | SISSSSSYIYYADSV | ARDPYYDILTGYYLY | RASQSISSYLN | AASSLQS | QQSYSTPLIT |
| 009770 | MN (SEQ | KG (SEQ ID NO: | (SEQ ID NO: 672) | (SEQ ID NO: | (SEQ ID | (SEQ ID |
| | ID NO: | 437) | | 907) | NO: 1142) | NO: 1377) |
| | 202) | | | | | |
| AB- | GFTFSSYW | RINSDGSSTSYADS | ARDGRNIAVAGLDY | RASQSISRWLA | KASSLES | QQYNSYQGT |
| 009771 | MH (SEQ | VKG (SEQ ID | (SEQ ID NO: 673) | (SEQ ID NO: | (SEQ ID | (SEQ ID |
| | ID NO: | NO: 438) | | 908) | NO: 1143) | NO: 1378) |
| | 203) | | | | | |
| AB- | GGSISSSSY | SIYYSGSTYYNPSL | ARHLQPSYGGNAFDI | TGSSSNIGAGYD | GNSNRPS | QSYDSSLSGY |
| 009772 | YWG (SEQ | KS (SEQ ID | (SEQ ID NO: 674) | VH (SEQ ID | (SEQ ID | V (SEQ ID |
| | ID NO: | NO: 439) | | NO: 909) | NO: 1144) | NO: 1379) |
| | 204) | | | | | |
| AB- | GYTFTGYY | RINPNSGGTNYAQ | ARDGCSGGSCYSWWFDP | RASQSISSYLN | AASSLQS | QQSYSTPLT |
| 009773 | MH (SEQ | KFQG (SEQ ID | (SEQ ID NO: 675) | (SEQ ID NO: | (SEQ ID | (SEQ ID |
| | ID NO: | NO: 440) | | 910) | NO: 1145) | NO: 1380) |
| | 205) | | | | | |
| AB- | GGSISSSSY | SIYYSGSTYYNPSL | ARQKTDIVVVVATEVAFDY | KSSQSVLYSSNN | WASTRES | QQYYSTPLT |
| 009774 | YWG (SEQ | KS (SEQ ID | (SEQ ID NO: 676) | KNYLA (SEQ | (SEQ ID | (SEQ ID |
| | ID NO: | NO: 441) | | ID NO: 911) | NO: 1146) | NO: 1381) |
| | 206) | | | | | |
| AB- | GGSISSSSY | SIYYSGSTYYNPSL | ARQVRSGIVVVTPYYFDY | RASQSVSSSYLA | GASSRAT | QQYGSSPRT |
| 009775 | YWG (SEQ | KS (SEQ ID | (SEQ ID NO: 677) | (SEQ ID NO: | (SEQ ID | (SEQ ID |
| | ID NO: | NO: 442) | | 912) | NO: 1147) | NO: 1382) |
| | 207) | | | | | |
| AB- | GGSISSGG | YIYYSGSTYYNPSL | ARDQYDSSGYAFGAFDY | SGDKLGDKYAC | QDSKRPS | QAWDSSTAW |
| 009776 | YYWS (SEQ | KS (SEQ ID | (SEQ ID NO: 678) | (SEQ ID NO: | (SEQ ID | V (SEQ ID |
| | ID NO: | NO: 443) | | 913) | NO: 1148) | NO: 1383) |
| | 208) | | | | | |
| AB- | GFTFSSYS | SISSSSSYIYYADSV | ARDESVAHYYGSGSVDV | QGDSLRSYYAS | GKNNRPS | NSRDSSGNRW |
| 009777 | MN (SEQ | KG (SEQ ID NO: | (SEQ ID NO: 679) | (SEQ ID NO: | (SEQ ID | V (SEQ ID |
| | ID NO: | 444) | | 914) | NO: 1149) | NO: 1384) |
| | 209) | | | | | |
| AB- | GGSISSSSY | SIYYSGSTYYNPSL | ARQFRRWLQLGPSYFDY | RASQSISSWLA | KASSLES | QQYNSYSRAW |
| 009778 | YWG (SEQ | KS (SEQ ID | (SEQ ID NO: 680) | (SEQ ID NO: | (SEQ ID | T (SEQ ID |
| | ID NO: | NO: 445) | | 915) | NO: 1150) | NO: 1385) |
| | 210) | | | | | |
| AB- | GFTFSNAW | RIKTKSDGGTTDY | SRNPFLDY | RASQGIKYYLA | AASSLLS | QQYNSYPYT |
| 009779 | MS (SEQ | AAPVKG (SEQ | (SEQ ID NO: 681) | (SEQ ID NO: | (SEQ ID | (SEQ ID |
| | ID NO: | ID NO: 446) | | 916) | NO: 1151) | NO: 1386) |
| | 211) | | | | | |
| AB- | GGSISSGD | YIYYSGSTYYNPSL | ARDRWGITIFGVVNRDGMD | RASQSISSYLN | AASSLQS | QQSYSFPYT |
| 009780 | YYWS (SEQ | KS (SEQ ID | V (SEQ ID NO: 682) | (SEQ ID NO: | (SEQ ID | (SEQ ID |
| | ID NO: | NO: 447) | | 917) | NO: 1152) | NO: 1387) |
| | 212) | | | | | |
| AB- | GFTFSNAW | RIKSKTDGGTTDY | TTLGHQYYDSSGYDYYYG | RASQSISSWLA | DASSLES | QQYNSYTWT |
| 009781 | MS (SEQ | AAPVKG (SEQ | MDV (SEQ ID NO: | (SEQ ID NO: | (SEQ ID | (SEQ ID |
| | ID NO: | ID NO: 448) | 683) | 918) | NO: 1153) | NO: 1388) |
| | 213) | | | | | |
| AB- | GGSISSYY | RIYTSGSTNYNPSL | ARGRLFYDSSGYYFDY | SGDALPKKYAY | EDSKRPS | YSTDSSGNHY |
| 009782 | WS (SEQ | KS (SEQ ID | (SEQ ID NO: 684) | (SEQ ID NO: | (SEQ ID | V (SEQ ID |
| | ID NO: | NO: 449) | | 919) | NO: 1154) | NO: 1389) |
| | 214) | | | | | |
| AB- | AGSISSHY | YIYYSGSTNYNPSL | ARTLRQWLARGYYYFDY | RASQSVSSSYLA | GASSRAT | QQYGSSPYT |
| 009783 | WS (SEQ | RS (SEQ ID | (SEQ ID NO: 685) | (SEQ ID NO: | (SEQ ID | (SEQ ID |
| | ID NO: | NO: 450) | | 920) | NO: 1155) | NO: 1390) |
| | 215) | | | | | |
| AB- | GGSISSSSY | SIYYSGSTYYNPSL | VRHRGWIQLWFFDY | TGTSSDVGGYN | DVINRPS | SSYTSSSTVV |
| 009784 | YWG (SEQ | KS (SEQ ID | (SEQ ID NO: 686) | (SEQ ID NO: | (SEQ ID | (SEQ ID |
| | ID NO: | NO: 451) | | 921)YVS | NO: 1156) | NO: 1391) |
| | 216) | | | | | |
| AB- | GGSISSYY | YIYYSGSTNYNPSL | ARLRAHTIFGVPIADAFDI | RASQSVSSSYLA | GASSRAT | QQYGSSPLT |
| 009785 | WS (SEQ | KS (SEQ ID | (SEQ ID NO: 687) | (SEQ ID NO: | (SEQ ID | (SEQ ID |
| | ID NO: | NO: 452) | | 922) | NO: 1157) | NO: 1392) |
| | 217) | | | | | |
| AB- | GGSFSGYY | EINHSGSTNYNPSL | ARHLSLITVIVVVTYQLDA | QGDSLRSYYAS | GKNNRPS | NSRDSSGNHR |
| 009786 | WS (SEQ | KS (SEQ ID | FDI (SEQ ID NO: | (SEQ ID NO: | (SEQ ID | V (SEQ ID |
| | ID NO: | NO: 453) | 688) | 923) | NO: 1158) | NO: 1393) |
| | 218) | | | | | |
| AB- | GGSISSSSY | SIYYSGSTYYNPSL | ARHYSSITIFGVVSGRYMD | TGTSSDVGSYNL | EGSKRPS | CSYAGSAV |
| 009787 | YWG (SEQ | KS (SEQ ID | V (SEQ ID NO: 689) | VS (SEQ ID | (SEQ ID | (SEQ ID |
| | ID NO: | NO: 454) | | NO: 924) | NO: 1159) | NO: 1394) |
| | 219) | | | | | |
| AB- | GGSISSHY | YIYYSGSTNYNPSL | ARDLRGWLQSPNWYFDL | RASQSVSSSYLA | GASSRAT | QQYGSSPAYT |
| 009788 | WS (SEQ | KS (SEQ ID | (SEQ ID NO: 690) | (SEQ ID NO: | (SEQ ID | (SEQ ID |
| | ID NO: | NO: 455) | | 925) | NO: 1160) | NO: 1395) |
| | 220) | | | | | |
| AB- | GFTFSSYA | AISGSGGSTYYADS | AKESGSGYYN (SEQ | SGDKLGDKYAC | QDSKRPS | QAWDSSSVV |
| 009789 | MS (SEQ | VKG (SEQ ID | ID NO: 691) | (SEQ ID NO: | (SEQ ID | (SEQ ID |
| | ID NO: | NO: 456) | | 926) | NO: 1161) | NO: 1396) |
| | 221) | | | | | |
| AB- | GFTFSSYA | AISGSGGSTYYADS | AKTSGTGTLAY (SEQ | SGDKLGDKYAC | QDSKRPS | QAWDSSTLV |
| 009790 | MS (SEQ | VKG (SEQ ID | ID NO: 692) | (SEQ ID NO: | (SEQ ID | (SEQ ID |
| | ID NO: | NO: 457) | | 927) | NO: 1162) | NO: 1397) |
| | 222) | | | | | |
| AB- | GGSISSSSY | SIYYSGSTYYNPSL | AREPRRVKQWLVVPYYYM | SGDKLGDKYAC | QDSKRPS | QAWDSSIVV |
| 009791 | YWG (SEQ | KS (SEQ ID | DV (SEQ ID NO: 693) | (SEQ ID NO: | (SEQ ID | (SEQ ID |
| | ID NO: | NO: 458) | | 928) | NO: 1163) | NO: 1398) |
| | 223) | | | | | |
| AB- | GGSISSYY | YIYYSGSTNYNPSL | ARTLHSTIFGVVIMPSSFD | RASQSISSWLA | KASSLES | QQYNSYAT |
| 009792 | WS (SEQ | KS (SEQ ID | Y (SEQ ID NO: 694) | (SEQ ID NO: | (SEQ ID | (SEQ ID |
| | ID NO: | NO: 459) | | 929) | NO: 1164) | NO: 1399) |
| | 224) | | | | | |
| AB- | GYTFTSYGI | WISAYNGNTNYAQ | ARLHRMITFGGVIAQLDV | RASQSVSSSYLA | GASSRAT | QQYGSSPWT |
| 009793 | S (SEQ ID | KLQG (SEQ ID | (SEQ ID NO: 695) | (SEQ ID NO: | (SEQ ID | (SEQ ID |
| | NO: 225) | NO: 460) | | 930) | NO: 1165) | NO: 1400) |
| AB- | GYTLTELS | GFDPEDGETIYAQ | ATAGEQWLDRYYFDY | TGSSSNIGAGYD | GNSNRPS | QSYDSSLSAR |
| 009794 | MH (SEQ | KFQG (SEQ ID | (SEQ ID NO: 696) | VH (SEQ ID | (SEQ ID | YV (SEQ ID |
| | ID NO: | NO: 461) | | NO: 931) | NO: 1166) | NO: 1401) |
| | 226) | | | | | |
| AB- | GYTFTSYDI | WMNPNSGNTGYA | ARARGYQLLFNYYYYMDV | SGDKLGDKYAC | QDSKRPS | QAWDSSTAV |
| 009795 | N (SEQ ID | QKFQG (SEQ ID | (SEQ ID NO: 697) | (SEQ ID NO: | (SEQ ID | (SEQ ID |
| | NO: 227) | NO: 462) | | 932) | NO: 1167) | NO: 1402) |
| AB- | GGSISSSSY | SIYYSGSTYYNPSL | ARHKGQWLVRANWFDP | QGDSLRSYYAS | GKNNRPS | NSRDSSGNHL |
| 009796 | YWG (SEQ | KS (SEQ ID | (SEQ ID NO: 698) | (SEQ ID NO: | (SEQ ID | (SEQ ID |
| | ID NO: | NO: 463) | | 933) | NO: 1168) | NO: 1403) |
| | 228) | | | | | |
| AB- | GGSISSSSY | SIYYSGSTYYNPSL | ARHLRGGVIVATIYGVDY | RASQSVSSSYLA | GASSRAT | QQYGSSQT |
| 009797 | YWG (SEQ | KS (SEQ ID | (SEQ ID NO: 699) | (SEQ ID NO: | (SEQ ID | (SEQ ID |
| | ID NO: | NO: 464) | | 934) | NO: 1169) | NO: 1404) |
| | 229) | | | | | |
| AB- | GYTFTSYY | IINPSGGSTSYAQK | AREVPTFTIFWPLGRGGGW | TGTSSDVGSYNL | EGSKRPS | CSYAGSVV |
| 009798 | MH (SEQ | FQG (SEQ ID | FDP (SEQ ID NO: | VS (SEQ ID | (SEQ ID | (SEQ ID |
| | ID NO: | NO: 465) | 700) | NO: 935) | NO: 1170) | NO: 1405) |
| | 230) | | | | | |
| AB- | GYTFTSYDI | WMNPNSGNTGYA | ARGRLRITIFNRVYYFDY | SGDKLGDKYAC | QDSKRPS | QAWDSSTAW |
| 009799 | N (SEQ ID | QKFQG (SEQ ID | (SEQ ID NO: 701) | (SEQ ID NO: | (SEQ ID | V (SEQ ID |
| | NO: 231) | NO: 466) | | 936) | NO: 1171) | NO: 1406) |
| AB- | GFTFSSYS | SISSSSSYIYYADSV | ARGHFDWLLYETYYFDY | TGTSSDVGGYN | EVSKRPS | SSYAGSNNVV |
| 009800 | MN (SEQ | KG (SEQ ID NO: | (SEQ ID NO: 702) | YVS (SEQ ID | (SEQ ID | (SEQ ID |
| | ID NO: | 467) | | NO: 937) | NO: 1172) | NO: 1407) |
| | 232) | | | | | |
| AB- | GFTFSSYW | NIKQDGSEKYYVD | ARDTVRREQWLVLDYYYM | SGDKLGDKYAC | QDSKRPS | QAWDSSIHVV |
| 009801 | MS (SEQ | SVKG (SEQ ID | DV (SEQ ID NO: | (SEQ ID NO: | (SEQ ID | (SEQ ID |
| | ID NO: | NO: 468) | 703) | 938) | NO: 1173) | NO: 1408) |
| | 233) | | | | | |
| AB- | GGSISSSSY | SIYYSGSTYYNPSL | ARQPRRITIFGVVITPTNN | TGSSSNIGAGYD | GNSNRPS | QSYDSSLSDV |
| 009802 | YWG (SEQ | KS (SEQ ID | WFDP (SEQ ID | VH (SEQ ID | (SEQ ID | V (SEQ ID |
| | ID NO: | NO: 469) | NO: 704) | NO: 939) | NO: 1174) | NO: 1409) |
| | 234) | | | | | |
| AB- | GFTVSSNY | VIYSGGSTYYADS | ARDYGDFYFDY | RASQSVSSNLA | GASTRAT | QQYNNWPRT |
| 010019 | MS (SEQ | VKG (SEQ ID | (SEQ ID NO: 705) | (SEQ ID NO: | (SEQ ID | (SEQ ID |
| | ID NO: | NO: 470) | | 940) | NO: 1175) | NO: 1410) |
| | 235) | | | | | |
| AB- | GFTFSSYG | VISYDGSNKYYAD | AKDYGDYGAFDI (SEQ | KSSQSVLYSSNN | WASTRES | QQYYSTPH |
| 4497999 | MH (SEQ | SVKG (SEQ ID | ID NO: 1897) | KNYLA (SEQ | (SEQ ID | (SEQ ID |
| 20 | ID NO: | NO: 1889) | | ID NO: 1905) | NO: 1913) | NO: 1921) |
| | 1881) | | | | | |
| AB- | GGTFSSYAI | GIIPIFGTANYAQK | ASVGGDYDLDY (SEQ | RASQSVSSYLA | DASNRAT | QQRSNWPPYT |
| 4496014 | S (SEQ ID | FQG (SEQ ID | ID NO: 1898) | (SEQ ID NO: | (SEQ ID | (SEQ ID |
| 61 | NO: 1882) | NO: 1890) | | 1906) | NO: 1914) | NO: 1922) |
| AB- | GGTFSSY | GIIPIFGTANYAQK | ASVGGDYDLDY (SEQ | RASQSVSSYLA | WPP | QQRSNWPPYT |
| 4496352 | AIS (SEQ | [symbol] | ID NO: 1899) | (SEQ ID NO: | DASNRAT | (SEQ ID |
| 24 | ID NO: | | ASVGGDYDLD | [symbol] | (SEQ ID | NO: 1923) |
| | 1883) | | RASQSVSS | DASNRAT YTF | NO: 1915) | |
| | | | YW YLA | | | |
| AB- | GGTFSSYAI | GIIPIFGTANYAQK | ASVGGDYDLDY (SEQ | RASQSVSSYLA | DASNRAT | QQRSNWPPYT |
| 4497472 | S (SEQ ID | FQG (SEQ ID | ID NO: 1900) | (SEQ ID NO: | (SEQ ID | (SEQ ID |
| 65 | NO: 1884) | NO: 1892) | | 1908) | NO: 1916) | NO: 1924) |
| AB- | GGTFSSYAI | GIIPIFGTANYAQK | ASVGGDYDLDY (SEQ | RASQSVSSYLA | DASNRAT | QQRSNWPPYT |
| 4497813 | S (SEQ ID | FQG (SEQ ID | ID NO: 1901) | (SEQ ID NO: | (SEQ ID | (SEQ ID |
| 53 | NO: 1885) | NO: 1893) | | 1909) | NO: 1917) | NO: 1925) |
| AB- | GGTFSSYAI | GIIPIFGTANYAQK | ASVGGDYDLDY (SEQ | RASQSVSSYLA | DASNRAT | QQRSNWPPYT |
| 4498417 | S (SEQ ID | FQG (SEQ ID | ID NO: 1902) | (SEQ ID NO: | (SEQ ID | (SEQ ID |
| 46 | NO: 1886) | NO: 1894) | | 1910) | NO: 1918) | NO: 1926) |
| AB- | GFSLSTSG | LIYWDDDKRYSPS | AHLTTLTIFDY (SEQ | TGASSDVGAYN | DVSNRPS | SSYTSSSVV |
| 4496458 | VGVG (SEQ | LKS (SEQ ID | ID NO: 1903) | YVS (SEQ ID | (SEQ ID | (SEQ ID |
| 91 | ID NO: | NO: 1895) | | NO: 1911) | NO: 1919) | NO: 1927) |
| | 1887) | | | | | |
| AB- | GFSPSTSGV | LIYWDDDKRYSPS | AHHSVATIWDY (SEQ | TGTRSDVGGYN | EVSNRPS | SSYTSSSTLV |
| 4495981 | GVG (SEQ | LKS (SEQ ID | ID NO: 1904) | YVS (SEQ ID | (SEQ ID | (SEQ ID |
| 46 | ID NO: | NO: 1896) | | NO: 1912) | NO: 1920) | NO: 1928) |
| | 1888) | | | | | |

[symbol]

indicates data missing or illegible when filed

TABLE 5
VH and VL sequences

| Anti- | | |
|---|---|---|
| body | VH | VL |
| AB- | QVQLVQSGAEVKKPGASVKVSCKASGYTFTSYGISWVRQA | EIVLTQSPATLSLSPGERATLSCRASQSVSSYLAWYQQ |
| 009269 | PGQGLEWMGWISAYNGNTNYAQKLQGRVTMTTDTSTSTA | KPGQAPRLLIYDASNRATGIPARFSGSGSGTDFTLTIS |
| | YMELRSLRSDDTAVYYCAREGDCSGGSCYSGYYYYYGMD | SLEPEDFAVYYCQQRSNWGTFGPGTKVDIK |
| | VWGQGTTVTVSS (SEQ ID NO: 1411) | (SEQ ID NO: 1646) |
| AB- | QMQLVQSGPEVKKPGTSVKVSCKASGFTFTSSAMQWVRQ | EIVLTQSPGTLSLSPGERATLSCRASQSVSSSYLAWYQ |
| 009270 | ARGQRLEWIGWIVVGSGNTNYAQKFQERVTITRDMSTSTA | QKPGQAPRLLIYGASSRATGIPDRFSGSGSGTDFTLTI |
| | YMELSSLRSEDTAVYYCAVNYCSSTSCYDAFDIWGQGTMV | SRLEPEDFAVYYCQQYGSSPWTFGQGTKVEIK |
| | TVSS (SEQ ID NO: 1412) | (SEQ ID NO: 1647) |
| AB- | QVQLVQSGAEVKKPGASVKVSCKVSGYTLTELSMHWVRQ | QSVLTQPPSVSAAPGQKVTISCSGSSSNIGNNYVSWYQ |
| 009272 | APGKGLEWMGGFDPEDGETIYAQKFQGRVTMTEDTSTDTA | QLPGTAPKLLIYDNNKRPSGIPDRFSGSKSGTSATLGI |
| | YMELSSLRSEDTAVYYCATAPPYCSSTSCPINWFDPWGQG | TGLQTGDEADYYCGTWDSSLSEWVFGGGTKLTVL |
| | TLVTVSS (SEQ ID NO: 1413) | (SEQ ID NO: 1648) |
| AB- | QVQLVQSGAEVKKPGSSVKVSCKASGGTFSSYAISWVRQA | EIVLTQSPATLSLSPGERATLSCRASQSVSSYLAWYQQ |
| 009273 | PGQGLEWMGGIIPIFGTANYAQKFQGRVTITTDESTSTAY | KPGQAPRLLIYDASNRATGIPARFSGSGSGTDFTLTIS |
| | MELSSLRSEDTAVYYCARVGVYDSSGYYFDYWGQGTLVTV | SLEPEDFAVYYCQQRSNWPPRLTFGGGTKVEIK |
| | SS (SEQ ID NO: 1414) | (SEQ ID NO: 1649) |
| AB- | QVTLRESGPALVKPTQTLTLTCTFSGFSLSTSGMRVSWIR | DIVMTQSPDSLAVSLGERATINCKSSQSVLYSSNNKNY |
| 009274 | QPPGKALEWLARIDWDDDKFYSTSLKTRLTISKDTSKNQV | LAWYQQKPGQPPKLLIYWASTRESGVPDRFSGSGSGT |
| | VLTMTNMDPVDTATYYCARSYSSSLPFDYWGQGTLVTVSS | DFTLTISSLQAEDVAVYYCQQYYSTPFTFGPGTKVDIK |
| | (SEQ ID NO: 1415) | (SEQ ID NO: 1650) |
| AB- | QVTLRESGPALVKPTQTLTLTCTFSGFSLSTSGMRVSWIR | QSVLTQPPSASGTPGQRVTISCSGSSSNIGSNYVYWYQ |
| 009275 | QPPGKALEWLARIDWDDDKFYSTSLKTRLTISKDTSKNQV | QLPGTAPKLLIYRNNQRPSGVPDRFSGSKSGTSASLAI |
| | VLTMTNMDPVDTATYYCARSNYDILTGRLDAFDIWGQGTM | SGLRSEDEADYYCAAWDDSLSGWVFGGGTKLTVL |
| | VTVSS (SEQ ID NO: 1416) | (SEQ ID NO: 1651) |
| AB- | EVQLLESGGGLVQPGGSLRLSCAASGFTFSSYAMSWVRQA | DIQLTQSPSFLSASVGDRVTITCRASQGISSYLAWYQQ |
| 009276 | PGKGLEWVSAISGSGGSTYYADSVKGRFTISRDNSKNTLY | KPGKAPKLLIYAASTLQSGVPSRFSGSGSGTEFTLTIS |
| | LQMNSLRAEDTAVYYCAKDRNYDFWSGYYFDYWGQGTLV | SLQPEDFATYYCQQLNSYPLTFGGGTKVEIK |
| | TVSS (SEQ ID NO: 1417) | (SEQ ID NO: 1652) |
| AB- | QVQLVESGGGVVQPGRSLRLSCAASGFTFSSYAMHWVRQA | SYELTQPPSVSVSPGQTASITCSGDKLGDKYACWYQQ |
| 009277 | PGKGLEWVAVISYDGSNKYYADSVKGRFTISRDNSKNTLY | KPGQSPVLVIYQDSKRPSGIPERFSGSNSGNTATLTIS |
| | LQMNSLRAEDTAVYYCARDGGGLLLNWGQGTLVTVSS | GTQAMDEADYYCQAWDSSTVVFGGGTKLTVL |
| | (SEQ ID NO: 1418) | (SEQ ID NO: 1653) |
| AB- | QVQLVESGGGVVQPGRSLRLSCAASGFTFSSYAMHWVRQA | SYVLTQPPSVSVAPGKTARITCGGNNIGSKSVHWYQQ |
| 009278 | PGKGLEWVAVISYDGSNKYYADSVKGRFTISRDNSKNTLY | KPGQAPVLVVYDDSDRPSGIPERFSGSNSGNTATLTIS |
| | LQMNSLRAEDTAVYYCARDGSSWYIDYWGQGTLVTVSS | RVEAGDEADYYCQVWDSSSDHYVFGTGTKVTVL |
| | (SEQ ID NO: 1419) | (SEQ ID NO: 1654) |
| AB- | QVQLVESGGGVVQPGRSLRLSCAASGFTFSSYAMHWVRQA | EIVLTQSPGTLSLSPGERATLSCRASQSVSSSYLAWYQ |
| 009279 | PGKGLEWVAVISYDGSNKYYADSVKGRFTISRDNSKNTLY | QKPGQAPRLLIYGASSRATGIPDRFSGSGSGTDFTLTI |
| | LQMNSLRAEDTAVYYCARPRGGSYYSAFDIWGQGTMVTV | SRLEPEDFAVYYCQQYGSSPWTFGQGTKVEIK |
| | SS (SEQ ID NO: 1420) | (SEQ ID NO: 1655) |
| AB- | QVQLVESGGGVVQPGRSLRLSCAASGFTFSSYGMHWVRQA | DIQMTQSPSSLSASVGDRVTITCRASQGISNYLAWFQQ |
| 009280 | PGKGLEWVAVISYDGSNKYYADSVKGRFTISRDNSKNTLY | KPGKAPKSLIYAASSLQSGVPSKFSGSGSGTDFTLTIS |
| | LQMNSLRAEDTAVYYCAKSRGGGYYYYYMDVWGKGTTV | SLQPEDFATYYCQQYNSYPPTFGQGTKLEIK |
| | TVSS (SEQ ID NO: 1421) | (SEQ ID NO: 1656) |
| AB- | EVQLVETGGGLIQPGGSLRLSCAASGFTVSSNYMSWVRQA | DIQLTQSPSFLSASVGDRVTITCRASQGISSYLAWYQQ |
| 009281 | PGKGLEWVSVIYSGGSTYYADSVKGRFTISRDNSKNTLYL | KPGKAPKLLIYAASTLQSGVPSRFSGSGSGTEFTLTIS |
| | QMNSLRAEDTAVYYCARDLYYYGMDVWGQGTTVTVSS | SLQPEDFATYYCQQLNSYPTFGQGTKVEIK |
| | (SEQ ID NO: 1422) | (SEQ ID NO: 1657) |
| AB- | EVQLVESGGGLIQPGGSLRLSCAASGFTVSSNYMSWVRQA | QSVLTQPPSVSGAPGQRVTISCTGSSSNIGAGYDVHWY |
| 009282 | PGKGLEWVSVIYSGGSTYYADSVKGRFTISRDNSKNTLYL | QQLPGTAPKLLIYGNSNRPSGVPDRFSGSKSGTSASLA |
| | QMNSLRAEDTA VYYCARILPLNWYYFDYWGQGTLVTVSS | ITGLQAEDEADYYCQSYDSSLSGSGVFGTGTKVTVL |
| | (SEQ ID NO: 1423) | (SEQ ID NO: 1658) |
| AB- | EVQLVESGGGLIQPGGSLRLSCAASGFTVSSNYMSWVRQA | SYELTQPPSVSVSPGQTASITCSGDKLGDKYACWYHQ |
| 009283 | PGKGLEWVSVIYSGGSTYYADSVKGRFTISRDNSKNTLYL | KPGQSPVLVIYQDTKRPSGIPERFSASNSGNTATLTIS |
| | QMNSLRAEDTAVYYCATSSFDYYYYFMDVWGKGTTVTVSS | GTQALDEADYYCQAWDSSIVVFGGGTKLTVL |
| | (SEQ ID NO: 1424) | (SEQ ID NO: 1659) |
| AB- | QVQLQESGPGLVKPSQTLSLTCTVSGGSISSGGYYWSWIR | EIVLTQSPGTLSLSPGERATLSCRASQSVSSSYLAWYQ |
| 009284 | QHPGKGLEWIGYIYYSGSTYYNPSLKSRVTISVDTSKNQF | QKPGQAPRLLIYGASSRATGIPDRFSGSGSGTDFTLTI |
| | SLKLSSVTAADTAVYYCARAPTIFGVVIGWFDPWGQGTLV | SRLEPEDFAVYYCQQYGSSPLTFGQGTRLEIK |
| | TVSS (SEQ ID NO: 1425) | (SEQ ID NO: 1660) |
| AB- | QVQLQESGPGLVKPSQTLSLTCTVSGGSISSGGYYWSWIR | EIVLTQSPGTLSLSPGERATLSCRASQSVSSSYLAWYQ |
| 009285 | QHPGKGLEWIGYIYYSGSTYYNPSLKSRVTISVDTSKNQF | QKPGQAPRLLIYGASSRATGIPDRFSGSGSGTDFTLTI |
| | SLKLSSVTAADTAVYYCARAPRITIFGVVSPFDYWGQGTL | SRLEPEDFAVYYCQQYGSSPLTFGGGTKVEIK |
| | VTVSS (SEQ ID NO: 1426) | (SEQ ID NO: 1661) |
| AB- | QVQLQESGPGLVKPSQTLSLTCTVSGGSISSGDYYWSWIC | SSELTQDPAVSVALGQTVRITCQGDSLRSYYASWYQQ |
| 009286 | QAEAKGLEWIGYIYYSGSTYYNPSLKSRVTISVDTSKNQF | KPGQAPVLVIYGKNNRPSGIPDRFSGSSSGNTASLTIT |
| | SLKLSSVTAADTAVYYCAREGRFLEWLLSVNYYYYMDVWG | GTQAEDEADYYCNSRDSSGNHGVFGTGTKVTVL |
| | KGTTVTVSS (SEQ ID NO: 1427) | (SEQ ID NO: 1662) |
| AB- | QLQLQESGPGLVKPSETLSLTCTVSGGSISSSSYYWGWIR | DIQLTQSPSFLSASVGDRVTITCRASQGISSYLAWYQQ |
| 009287 | QPPGKGLEWIGSIYYSGSTYYNPSLKSRVTISVDTSKNQF | KPGKAPKLLIYAASTLQSGVPSRFSGSGSGTEFTLTIS |
| | SLKLSSVTAADTAVYYCARTRITIFGGERYFDLWGRGTLV | SLQPEDFATYYCQQLNSYPLTFGGGTKVEIK |
| | TVSS (SEQ ID NO: 1428) | (SEQ ID NO: 1663) |
| AB- | QVQLQESGPGLVKPSETLSLTCTVSGGSISSYYWSWIRQP | EIVLTQSPGTLSLSPGERATLSCRASQSVSSSYLAWYQ |
| 009288 | PGKGLEWIGYIYYSGSTNYNPSLKSRVTISVDTSKNQFSL | QKPGQAPRLLIYGASSRATGIPDRFSGSGSGTDFTLTI |
| | KLSSVTAADTAVYYCARGFDYWGQGTLVTVSS | SRLEPEDFAVYYCQQYGSSPWTFGQGTKVEIK |
| | (SEQ ID NO: 1429) | (SEQ ID NO: 1664) |
| AB- | EVQLVQSGAEVKKPGESLKISCKGSGYSFTSYWIGWVRQL | EIVMTQSPLFLPVTPGEPASISCRSSQSLLHSNGYNYL |
| 009289 | PGKGLEWMGIIYPGDSDTRYSPSFQGQVTISADKSISTAY | DWYLQKPGQSPQLLIYLGSNRASGVPDRFSGSGSGTDF |
| | LQWSSLKASDTAMYYCARRGFGLTYYGMDVWGQGTTVTVS | TLKISRVEAEDVGVYYCMQALQTPQTFGQGTKVEIK |
| | S (SEQ ID NO: 1430) | (SEQ ID NO: 1665) |
| AB- | DVQLVESGGGLVQPGGSLRLSCIASGFAFSDHHMDWVRQA | EIVLTQSPGTLSLPPGERATLSCRASQSVNKFVLAWYQ |
| 009290 | PGKGLEWVGRIRDKADSYTTEYAASVRGRFTISRDDLKNS | HKPGQAPRLLIYGASTRATGIPDRFSGSGSGTDFTLTI |
| | QYLQMNSLKTEDTAMYYCASSHSRGYYAFDYWGQGALVTV | NRLEPEDLAVYYCQLYDRSPPPIGQGTKVEIK |
| | SS (SEQ ID NO: 1431) | (SEQ ID NO: 1666) |
| AB- | EVHLLESGGGLVQPGGSLRLSCAASGFTFTTYAMFWVRQA | EIVLTQSPATLSLSPGERATLSCRASQSVSSYLAWYQQ |
| 009291 | PGKGLEWVSAINAGGAKTHYADSVRGRFTISRDNSKSTLY | RPGQAPRLLIYDASSRATGIPVRFSGSGSGTDFTLTIS |
| | LHMDRLRVGDTAIYYCAKVPSYIYDSRDDYLDFWGQGTLV | SLEPEDFAVYYCQQRSDWPLLTFGGGTKVEIK |
| | TVSS (SEQ ID NO: 1432) | (SEQ ID NO: 1667) |
| AB- | EVQLVDSGGGLVQPGGALRLSCVVSGFTVRYNYMSWVRQ | ESVLTQSPGTLSLSPGETVTLSCRASQSITNNYLAWYQ |
| 009292 | APGKGLEWVSIIYRGDRGGSTYYIDSVKGRFIISRDDSRN | QKPGQAPRLVVYHASKRASGIPDRFSGSGSGTDFALTI |
| | TVYLQMNSLSAEDTAVYYCASSHSADYLGPFDYWGRGTLV | SRLEPEDFAVYYCQQFGTFGTFGGGTKLEIK |
| | TVSS (SEQ ID NO: 1433) | (SEQ ID NO: 1668) |
| AB- | QAQLVESGGGVVQPGRSLRLSCAASGFNFNNYGMHWVRL | DIQMTQSPPSLSASVGDRVTFTCRASQDITNSLAWFQQ |
| 009293 | AAGKGLEWVAFISYEGSITHYADSVKGRFTVSRDFSKNTL | RPGKAPKSLIYAASTLHSGVPSKFSGSGSGTDFTLTIT |
| | YLQMNRLTTGDTAVYYCAKRREVLHLWRDEMDVWGQGTT | SLQPEDVATYYCQQYKTYPFTFGQGTRLEIK |
| | VTVSS (SEQ ID NO: 1434) | (SEQ ID NO: 1669) |
| AB- | EVRLLDSGGGLVQPGGSLRLSCVASGFTLSTYSVTWYRQA | EIVLTQSPATLSLSPGERATLSCRASQSVSAYFAWYQQ |
| 009294 | PGKGPEWVAVFSATGGTTDYADSVRGRFTFSRDNSENTLY | KPGQAPRLLIYDATNRATGIPARFSGSGFGTDFTLTIS |
| | VQMTSLRADDTAFYYCVKYLQSGDEGYWGPGTLVTVSS | NLEPDDFAVYYCQQRSFWPLTFGGGTKVEIK |
| | (SEQ ID NO: 1435) | (SEQ ID NO: 1670) |
| AB- | QVQLVESGGGVVQPGRSLRLSCAASGFTFSSYAMHWVRQA | QSVLTQPPSVSGAPGQRVTISCTGHNSNIGAGSDVHWY |
| 009295 | PGKGLEWVAILWPDGGKKYFADSVKGRFTISRDNSKNTLF | QQLPGTAPKLLIYGNRNRPSGVPDRFSGSKSGTSGSLA |
| | LQMSSLRAEDTATYYCARDPASGWGLDPWGQGTLVTVSS | ITGLQTEDEADYYCQSFDSSLNVYVFGTGTKVTVL |
| | (SEQ ID NO: 1436) | (SEQ ID NO: 1671) |
| AB- | QVQLVQSGAEVKKPGASVKVSCKASGYTFTSYDINWVRQA | SYELTQPPSVSVSPGQTASITCSGDKLGDKYACWYQQ |
| 009296 | TGQGLEWMGWMNPNSGNTGYAQKFQGRVTMTRNTSISTA | KPGQSPVLVIYQDSKRPSGIPERFSGSNSGNTATLTIS |
| | YMELSSLRSEDTAVYYCARAAKRITIFGTRGYYFDYWGQG | GTQAMDEADYYCQAWDSSTAWEVFGGGTKLTVL |
| | TLVTVSS (SEQ ID NO: 1437) | (SEQ ID NO: 1672) |
| AB- | QVQLVQSGAEVKKPGASVKVSCKASGYTFTSYGISWVRQA | DIVMTQSPLSLPVTPGEPASISCRSSQSLLHSNGYNYL |
| 009297 | PGQGLEWMGWISAYSGNTNYAQKLQGRVTMTTDTSTSTT | DWYLQKPGQSPQLLIYLGSNRASGVPDRFSGSGSGTDF |
| | YMELRSLRSDDTAVYYCARDSSSWPYVSLGYWGQGTLVT | TLKISRVEAEDVGVYYCMQALQTPRTFGQGTKLEIK |
| | VSS (SEQ ID NO: 1438) | (SEQ ID NO: 1673) |
| AB- | QVQLQESGPGLVKPSETLSLTCTVSGGSISSHYWSWIRQP | DIQMTQSPSSLSASVGDRVTITCRASQSISSYLNWYQQ |
| 009298 | PGKGLEWIGYIYYSGSTNYNPSLKSRVTISVDTSKNQFSL | KPGKAPKLLIYAASSLQSGVPSRFSGSGSGTDFTLTIS |
| | KLSSVTAADTAVYYCARIPRGWLQSPSYYFDYWGQGTLVT | SL QPEDFATYYCQQSYSTPQTFGQGTKVEIK |
| | VSS (SEQ ID NO: 1439) | (SEQ ID NO: 1674) |
| AB- | QVQLVQSGAEVKKPGASVKVSCKASGYTFSNYYMHWVRQ | QSALTQEASVSGTVGQKVTLSCTGNTNNIGSHAVGWY |
| 009299 | APGQGLEWMGIIKPSAGRTIYAQKFVGRVTMTRDTSTSTV | QQISHGAPKTVMFRNSLPSGIPGRFSGSQSGTTASLTI |
| | YMELSSLRSDDTAVYYCARGGGPTDRDYWGPGTLVAVSS | SGLQPEDEADYYCSTWDNSLSAVVFGGGTRLTVL |
| | (SEQ ID NO: 1440) | (SEQ ID NO: 1675) |
| AB- | EVQLVESGGGLVKPGGSLRLSCAASGFTFSSYRMNWVRQA | EIVMTQSPATLSVSPGERATLSCRASQSVSSNLAWYQQ |
| 009300 | PGKGLEWVSSISSSSSYIYYANSVKGRFTISRDNAKNSLY | KPGQAPRLLIYGASTRATGIPARFSGSGSGTEFTLTIS |
| | LQMNSLRAEDTAVYYCARVVWQLVENYYYYMDVWGKGTT | SLQSEDFAVYYCQQYNNWPPITFGQGTRLEIK |
| | VTVSS (SEQ ID NO: 1441) | (SEQ ID NO: 1676) |
| AB- | QVQLQQWGAGLLKPSETLSLTCAVYGGSFTNYYWNWIRQP | SSELTQDPAVSVALGQTVRITCQGDSLRKYYPTWYQQ |
| 009301 | PGRGLEWIGEINHSGSTNYKPSLKSRVTISIDTSKNQFSL | KPGQAPVLVIYGKNTRHSGIPDRFSGSSSGNTASLTIT |
| | KLSSVTAADTAVYFCARRLGYDNGWGTYFYGLDVWGQGTT | GAQAEDEADYYCNSRDSSDSRNWVFGGGTKLTIL |
| | VTVTS (SEQ ID NO: 1442) | (SEQ ID NO: 1677) |
| AB- | QLQLQESGPGLVKPSETLSLICNVSGGSIISTSHYWGWIR | SYELTQPPSVSVSPGQTARITCSGDALPKKYAYWYQQ |
| 009302 | QPPGKGLEWIGTIYYSGNTYYNPSLTSRATMSVDTSKNHF | RSGQAPVLVIYEDTKRPSGIPERFSGSSSGTVASLTIS |
| | SLNLSSVTAADTAVYFCARRSRAVAGKYYWYYDLWGRGAL | GAQVEDEADYYCYSTDSSGYHEVFGGGTKLTVL |
| | VSVSS (SEQ ID NO: 1443) | (SEQ ID NO: 1678) |
| AB- | EMELVESGGGLVQPGGSLRLSCAASGFTFSTYWMTWLRQT | DIQMTQSPSSLSAFVGDRVTITCRASQSINTYLNWYQQ |
| 009303 | PGKGLDWVANIKPDESEIHYVDSVKGRFTVSRDNAKNSVY | RPGKAPKLLIFLASSLQSGVPSRFRGGGSGTDFTLTIS |
| | LHMNSLRAEDTAVYYCARLRAVGGDDTFDVWGQGTMVT | SLQPEDFATYYCQQSYRSWTFGQGTKVEIK |
| | VSS (SEQ ID NO: 1444) | (SEQ ID NO: 1679) |
| AB- | EVQLVESGGGLVQPGGSLRLSCAASGFTFSDYAMTWVRQT | AIRMTQSPSSLSASTGDRVTITCRASQAITNYLAWYQQ |
| 009304 | PGKGLEWISAITENGFTTYYADSMRGRFTISRDNSKNTLY | KPGKAPKLLIASASTLQSGVPSRFSGSGSGTDFTLTIS |
| | LQMSSLRAEDTAVYYCAKYWSLSGPTELLDSWGQGTLVTV | SLQSEDFASYYCQQYYSYPLTFGGGTKVEIK |
| | SS (SEQ ID NO: 1445) | (SEQ ID NO: 1680) |
| AB- | EVQLLESGGNLVQPGGSLRLSCAASGFTFSSYSMSWFRQA | EIVLTQSPATLSLSPGERATLSCRASQSVRNFFAWYQQ |
| 009305 | PGKGLEWVSVIDNRGGNIHYSDSVRVRFTISRDNSKNTLY | KPGQAPRLLIYGASNRATGIPARFSGSGSGTDFTLTIS |
| | LQMSSLRAEDTAIYYCAQYVQEGMDVWGPGTTVTVSS | SLEPEDFAVYFCQQRFDWPLTFGAGTKVEIK |
| | (SEQ ID NO: 1446) | (SEQ ID NO: 1681) |
| AB- | QVQLVQSGAEVKKPGASVKVPCKASGYTFTSYQMHWVRR | SYELTQPPSVSVSPGQTARITCSGDALPKKYAYWYQQ |
| 009306 | APGQGLEWMGLIDPDTGGTRYTQNFQGRVTMTRDTSTTTV | KSGQAPVLVIYEDSKRPSGIPERFSGSSSGTMATLTIS |
| | YMELNSLTSGDTAVYYCARGGRVGATYPYNMDVWGKGT | GAQVEDDSDYYCFSTDSSGNHGVFGGGTRLTVL |
| | TVTVSS (SEQ ID NO: 1447) | (SEQ ID NO: 1682) |
| AB- | QVQLQESCPGLAKPSQTLSLTCTVSGGSISGRGYFWTWIR | QSVLTQPPSVSGAPGQRVTISCAGSSSNIGTGYDVHWY |
| 009307 | QPAGKGLEWIGDISSSGSTNYNPFLKSRVSVSLDASKNTF | QQLPGGAPKLLIYGNTNRPSGVPDRFSGSRSGTSASLA |
| | SLNLRSVTAADTAVYFCARDRRLYGDFYYYGMDVWGQGTT | ITGLQAEDEADYYCQSYDSSLAGSRVFGGGTKLTVL |
| | VTVSS (SEQ ID NO: 1448) | (SEQ ID NO: 1683) |
| AB- | EVQLVESGGGTVQPGGSLRLSCAGSGFSFNSYWMSWVRQA | SSELTQDPAVSVALGQTIRITCQGDSLRNYYASWYQQ |
| 009308 | PGKGLEWVASIKQDGSETYYVDSVKGRVSISRDNTKRSLF | KPGQAPLLVIYGKNNRPSGIPDRFSGSTSINSASLTIT |
| | LQMNSLRADDTAVYYCARGVDGISTIVVLVFWNWYFDLWG | GAQAEDEADYYCNSRDANTNHVLFGGGTKLTVV |
| | RGTLVTVSS (SEQ ID NO: 1449) | (SEQ ID NO: 1684) |
| AB- | QVQLQESGPGLVKPSGTLSLTCTVSVGSISSHYWSWIRQP | EIVLTQSPGTLSLSPGERATLSCRASQSVSSSYLAWYQ |
| 009309 | PGKGLEWIGYIYYSGSTNYNPSLKSRVTISVDTSKNQFSL | QKPGQAPRLLIYGASSRATGIPDRFSGSGSGTDFTLTI |
| | KLSSVTAADTAVYYCARSGRGWLQLNPSYYFDYWGQGTLV | SRLEPEDFAVYYCQQYGSSPPGTFGQGTRLEIK |
| | TVSS (SEQ ID NO: 1450) | (SEQ ID NO: 1685) |
| AB- | EVQLLESGGGLVQPGGSLRLSCAASGFTFSSYAMSWVRQA | EIVLTQSPGTLSLSPGERATLSCRASQSLSSSNLAWYQ |
| 009310 | PGKGLEWVSAISGSGTSTYYADSVKGRFTISRDNSKNTLY | QKPGQAPRLLIYGASSRATGIPDRFSGSGSGTDFTLTI |
| | LQMNSLRAEDTAVYYCAKGYPRYYYGMDVWGQGTTVTVS | SRLEPEDFAVYYCQQYGSSPFTFGPGTKVDIK |
| | S (SEQ ID NO: 1451) | (SEQ ID NO: 1686) |
| AB- | QVQLVQSGAEVKKPGASVKVSCKASGYTFTSYDINWVRQA | QSALTQPASVSGSPGQSITISCTGTSSDVGGYNYVSWY |
| 009311 | TGQGLEWMGWMNPNSGNTGYAQKFQGRVTMTRNTSISTA | QQHPGKAPKLMIYDVSNRPSGVSNRFSGSKSGNTASLT |
| | YMELSSLRSEDTAVYYCARRRAATWSIYYYYYYMDVWGK | ISGLQAEDEADYYCTSYTSSSTLEGWVFGGGTKLTVL |
| | GTTVTVSS (SEQ ID NO: 1452) | (SEQ ID NO: 1687) |
| AB- | EVQLVESGGGLVQPGGSLRLSCAASGFIFSNYWMSWVRQA | DIQMTQSPSSLSASVGDRVTITCRASHGISTWLAWYQL |
| 009312 | PGKGLEWVANIKQDGGEQYYVDSVKGRFTISRDNGKNSLY | KPGKAPKSLIYAASNLQSGVPSRFSGSGSGTDFTLTIS |
| | LQLNSLRADDTAVYYCARSTYLPAAGTMNFWGRGTLVTV | SLQPEDFATYYCHQYNSYPFTFGGGTKVEIK |
| | SS (SEQ ID NO: 1453) | (SEQ ID NO: 1688) |
| AB- | QVQLQQWGAGLLKPSETLSLTCAVYGGSFSGYYWSWIRQP | SSELTQDPAVSVASGQTVRITCQGDSLRSYYASWYQQ |
| 009313 | PGKGLEWIGEINHSGSTNYNPSLKSRVTISVDTSKNQFSL | KPGQAPVLVIYGKNNRPSGIPDRFSGSSSGNTASLTIT |
| | KLSSVTAADTAVYYCARGNIVVVPAAMGVFLYYYYSMDVW | GAQAEDEADYYCNSRDSSGNHLVVFGGGTKLTVL |
| | GKGTTVTVSS (SEQ ID NO: 1454) | (SEQ ID NO: 1689) |
| AB- | QVQLQESGPGLVKPSETLSLTCTVSGGSISSHYWSWIRQP | EIVLTQSPGTLSLSPGERATLSCRASQSVSSSYLAWYQ |
| 009314 | PGKGLEWIGYIYYSGSTNYNPSLKSRVTMSVDTSKNQFSL | QKPGQAPRLLIYGASSRATGIPDRFSGSGSGTDFTLTI |
| | KLSSVTAADTAVYYCARGERQWLQLYSYYGMDVWGQGTTV | SRLEPEDFAVYYCQQYGSSPLTFGGGTKVEIK |
| | TVSSA (SEQ ID NO: 1455) | (SEQ ID NO: 1690) |
| AB- | QVQLVQSGAEVKKPGASVKVSCKASGYTFTSYGISWVRQA | SSELTQDPAVSVALGQTVRITCQGDSLRSYYASWYQQ |
| 009315 | PGQGLEWMGWISAYNGNTNYAQKLQGRVTMTTDTSTSTA | KPGQAPVLVIYGKNNRPSGIPDRFSGSSSGNTASLTIT |
| | YMELRSLRSDDTAVYYCARDVRMITFGGVIVYFDYWGQGT | GAQAEDEADYYCNSRDSSGNHRVFGGGTKLTVL |
| | LVTVSS (SEQ ID NO: 1456) | (SEQ ID NO: 1691) |
| AB- | EVQLVESGGGLVQPGGSLRLSCAASGFTFSNYWMHWVRQ | DVVMTQTPLSLSVTPGQPASISCKSSQSLLQSDGKTYL |
| 009316 | VPGKGLVWVSSINNDGSNTRYADSVKGRFTISRDNAKNTV | YWYLQKPGQPPQLLIYEVSKRFSGVPDRFSGSGSGTDF |
| | YMQMNSLRAEDTAVYYCARPWGYWGQGTLVTVSS (SEQ | TLKISRVEADDVGVYYCMQSIQVPITFGPGTKVDIK |
| | ID NO: 1457) | (SEQ ID NO: 1692) |
| AB- | QVQLVQSGAEVKKPGASVKVSCKASGYTFTSYDINWVRQA | SYELTQPPSVSVSPGQTASITCSGDKLGDKYACWYQQ |
| 009317 | TGQGLEWMGWMNPNSGNTGYAQKFQGRVTMTRNTSISTA | KPGQSPVLVIYQDSKRPSGIPERFSGSNSGNTATLTIS |
| | YMELSSLRSEDTAVYYCARGMKVVTIFGRREYYFDYWGQ | GTQAMDEADYYCQAWDSSTVVFGGGTKLTVL |
| | GTLVTVSS (SEQ ID NO: 1458) | (SEQ ID NO: 1693) |
| AB- | QLQLLESGPGRVKPSETLSLTCSVSGAFISTSNSFWGWIR | QSALTQPPSVSGSPGQSVTISCTGTSSDIGGYNYVSWY |
| 009318 | QPPGKGLEWIGSENYGGSSYFNPSLKRRVAISVDTSKNQF | QQHPGKGPKLMIYDVNKRPSGVPDRFSGSKSGNTASL |
| | SLKLRSVTAADTAIYYCARRPSLGFGSSWNFDLWGRGTLV | TISGLQAEDEAHYSCSSYAGSYTYVVFGGGTQLTVL |
| | TVSS (SEQ ID NO: 1459) | (SEQ ID NO: 1694) |
| AB- | EVQLVESGGGLVQTGGSLRLSCRGSGFSFSNDWLSWVRQA | DVVMAQSPLSLSVTLGQPASISCRSSQSLLYSNGNTYL |
| 009319 | PGKGLEWVANINQDGSEKYSVDSVKGRFTISRDNAKISLY | SWFQQRPGQSPRRLIYKVSIRDSGVPDRFSGSGSDTDF |
| | LQMNSLRAEDTAVYYCVRDAGGWGQGTLVTVSS | LKITRVEAEDVGIYYCVQGTHWPFTFGPGTKVDIK |
| | (SEQ ID NO: 1460) | T (SEQ ID NO: 1695) |
| AB- | QVQLVQSGAEVKKPGSSVKVSCKASGGTLSRCVITWVRQA | DIVMTQTPLSLPVTPGEPASISCRSSQSLLDSEDGNTY |
| 009320 | PGQGLEWMGRIIPIFGTVNYAQKFQGRVTIGADESTSTAY | LDWYLQKPGQSPQLLIYTLSYRASGVPDRFIGSGSGTD |
| | MELSRLRSEDTAVYYCANTDIGDVRFYGMDVWGQGTTVTV | FTLEISRVEAEDVGIYYCMQSMEFPWTFGPGTKVEIK |
| | SS (SEQ ID NO: 1461) | (SEQ ID NO: 1696) |
| AB- | QVQLQESGPGLVKPSQTLSLTCTVSGGSISDGDYYWSWIR | EVVLTQSPGTLSLSPGERATLSCRASQSVTSSYLAWYQ |
| 009321 | QPPGKGLEWIAYISYSGSTYYNPSLKSRVALSVDTSKNQF | QKAGQAPRLLIYGASSRATGIPDRFSGSGSGTDFTLTI |
| | SLNLNSVTAADTAVYYCARIRGERITIFAVLVTGAFDVWG | SRLDPEDFAVYYCQQYGSSPLTFGGGTKVEIK |
| | QGTLVTVSA (SEQ ID NO: 1462) | (SEQ ID NO: 1697) |
| AB- | QLQLQESGPGLVRPSETLSLTCSVSGDSISGTKNYWAWIR | HFMLTQPQSVSESPGETVIISCTRSSGSIASNYVQWYQ |
| 009322 | QPPGKGLEWIGSFYYNWGSTSYNASLKSRVSISVDTSRNQ | QRPGSAPTCVIYEDNQRPSGVPDRFSGSIDSSSNTASL |
| | LSLKLTSVSAADTAVYYCARRLEPRHYFDTWGRGSLVTVS | TISGLKTEDEGDYYCQSYDKGWVFGGGTKLTVL |
| | S (SEQ ID NO: 1463) | (SEQ ID NO: 1698) |
| AB- | QVHLVQSGAEVKKPGASVRVSCKVSGYSLSLLTMYWVRQ | EIELTQSPGTLSLSPGERATLSCRASQSVSSNYLAWYQ |
| 009323 | APGKGLEWMGSFDPQDGETMYAQKFQGRVTMTEDTSADT | QKPGQAPRLLIYGASSRATGIPDRLSGSGSGTDFTLTI |
| | AYMELSGLRSEDTAVYYCATDDVSLVVIYALAIWGQGTLV | SSLEPEDFAVYHCHQYGTSPHTFGQGTKLEIK |
| | TVSS (SEQ ID NO: 1464) | (SEQ ID NO: 1699) |
| AB- | EVQLFQSGGGLVQPGGSLRLSCKASGFTFSDYDISWVRQA | EIVLTQSPATLSLSPGERATLSCRASQSVTTFLGWYQQ |
| 009324 | PGKGLEWVSHITLTGRTYYVDSVQGRFTISRDNSKDTVYL | KPGQAPRLLIYDASNRAPGIPARFSGSGSGTDFTLTIS |
| | QMNGLRADDTAVYYCAKHLIRAYDYWGQGALVTVSS | SLEPEDVGVYYCQQRYNWPLTFGPGTKVEIK |
| | (SEQ ID NO: 1465) | (SEQ ID NO: 1700) |
| AB- | QVQLVESGGGVVQPGRSLRLSCAASGFTFNNYGMHWVRQ | QSVLTQPPSVSAAPGQKVTISCSGSSSNIGKNYVSWYR |
| 009325 | APGKGLEWVALISYEGSLKYYGDSVRGRFTVSRDNSRNTL | QFPGTAPKLLIYDNNKRPSGIPDRFSGSKSDTSATLGI |
| | YLQMNSLRVDDTAVYYCAKAGGIFAIHYYGMNVWGQGTT | TGLQTGDEADYYCVTWDSSLSAGVFGGGTKLTVL |
| | VTVSS (SEQ ID NO: 1466) | (SEQ ID NO: 1701) |
| AB- | QLQLQESGPGLVKPSETLSLTCTVSGGSISSSSYYWGWIR | DIQMTQSPSTLSASVGDRVTITCRASQSISSWLAWYQQ |
| 009326 | QPPGKGLEWIGSIYYSGSTYYNPSLKSRVTISVDTSKNQF | KPGKAPKLLIYKASSLESGVPSRFSGSGSGTEFTLTIS |
| | SLKLSSVTAADTAVYYCARDGAPLYDILTHDAFDIWGQGT | SLQPDDFATYYCQQYNSYPYTFGQGTKLEIK |
| | MVTVSS (SEQ ID NO: 1467) | (SEQ ID NO: 1702) |
| AB- | EVQLVESGGGLVRPGGSLRLSCVASGLPFSNPRMSWVRQS | QIVLTQSPDTLSLSPGERATLSCRASQTVSRNYLAWYQ |
| 009327 | PGKGLEWVGRIRSKADGGTSDYAAPVKGRFTISWDDSKNI | HKPGQAPRFLMYSASIRATDTPDRFSGSGSGTDFTLTI |
| | IYLQMDSLETEDTAMYWCATSHSFYYDGPFDYWGQGTLVT | SRLEPEDFAVYYCQHYGSSPPYTFGQGTKLEIK |
| | VSS (SEQ ID NO: 1468) | (SEQ ID NO: 1703) |
| AB- | EVQLVESGGGLVQPGGSLRLSCVVAGTTFSDQFMDWVRQA | AIQMTQSPSSLSASVGDRVTITCRASQVITNDLGWYQQ |
| 009328 | PGKGLEWVGRSRNKARSYTTEYAASVKGRFTISRDDSKKS | RPGKAPKLLIYATSRLQSGVPSRFSGSGSGTDFTLTIS |
| | LYLQMNTLKTEDTAMYYCTRDGGEGGYTAFDIWGQGTMVT | SLQPEDFATYYCLQDSNFPLTFGGGTKVEIK |
| | VSS (SEQ ID NO: 1469) | (SEQ ID NO: 1704) |
| AB- | QLQLQESGPGLVKPSETLSLTCTVSGGSISSSSYYWGWIR | SSELTQDPAVSVALGQTVRITCQGDSLRSYYASWYQQ |
| 009329 | QPPGKGLEWIGSIYYSGSTYYNPSLKSRVTISVDTSKNQF | KPGQAPVLVIYGKNNRPSGIPDRFSGSSSGNTASLTIT |
| | SLKLSSVTAADTAVYYCARHKMGWLQFAGWFDPWGQGTLV | GAQAEDEADYYCNSRDSSGNHWVFGGGTKLTVL |
| | TVSS (SEQ ID NO: 1470) | (SEQ ID NO: 1705) |
| AB- | QLQLQESGPGLVKPSETLSLTCTVSGGSISSSSYYWGWIR | EIVMTQSPATLSVSPGERATLSCRASQSVSSNLAWYQQ |
| 009330 | QPPGKGLEWIGSIYYSGSTYYNPSLKSRVTISVDTSKNQF | KPGQAPRLLIYGASTRATGIPARFSGSGSGTEFTLTIS |
| | SLKLSSVTAADTAVYYCARHAMSGITIFGVVTNNNWFDPW | SLQSEDFAVYYCQQYNNWPPYTFGQGTKLEIK |
| | GQGTLVTVSS (SEQ ID NO: 1471) | (SEQ ID NO: 1706) |
| AB- | QVTLKESGPALIKPTQTLTLTCTFSGFSLNTAGMRVNWIR | QSGLTQPASVSGSPGQSITISCTATSSDIGNYNYVSWY |
| 009331 | QPPGKALEWLAHIDWEDEKFYSTSLKTRLSISKDTSKDQV | QQHPGKAPKLMIYEVSSRPSGVSNRFSGSKSGNTASLT |
| | VLTMTNMDPVDTATYYCARNEWDFDAFDIWGQGILVTVSS | ISGLRAEDEANYYCSSYTTSRTYVFGTGTKVTVL |
| | (SEQ ID NO: 1472) | (SEQ ID NO: 1707) |
| AB- | AVQLVESGGGLVQPGGTLRLSCTASTFIFNNYAMSWVRQV | DIQMTQSPSTLSASVGDRVTITCRASESVSTWLAWYQQ |
| 009332 | PGKGLEWVSVISGSGSATYYADSVKGRFTISRDNSENTVD | KPGKAPQLLIYKASNLESGVPSRFSGSGSGTEFTLTIS |
| | LQMNSLRPEDTATYYCAKVRAGSGSHKAGYYFEKWGQGTL | SLQPDDSATYYCQQYSTYSTFGQGTKVEIK |
| | VIVSS (SEQ ID NO: 1473) | (SEQ ID NO: 1708) |
| AB- | QVQLQQWGTGLLKPSETLSLTCAVYGGSFAGYYWSWVRQ | EIVLTQSPATLSVSPGERATLSCRTSQIVGVNLAWYQQ |
| 009333 | PPGKGLQWIGEINHSGGTNYNPFLKSRVSISVDSSKNQFS | RPGQAPRLLIYGASTRATGIPDRFSGGGSGTQFTLTII |
| | LKLSSVTAADTAVYYCVRDSDMTLAAYYKGFQYGMDVWGQ | SLQSEDLAVYYCQQYDNWPRTFGRGTKVEIK |
| | GTTVTVSS (SEQ ID NO: 1474) | (SEQ ID NO: 1709) |
| AB- | QLQLQESGPGLVKPSETLSLTCTVSGGSITSRFDYWVWIR | QSVLTQPPSVSGTPGQRVSISCSGSSSNIGSNFVHWYQ |
| 009334 | QPPGKGLEWIGSISHGGNTYYTPSLKSRVTISIDASKRQV | QLPGAAPQLLICRNNERPSGVPDRFSGSKSGTSASLAI |
| | FLELSSVTAADTAMYHCARAYCSGGSCYVYYYFYVDVWGE | SGLRSEDEADYYCAAWDDTLSSPNWVFGGGTKLTVL |
| | GTTVTVSS (SEQ ID NO: 1475) | (SEQ ID NO: 1710) |
| AB- | QVQLQESGPGLVKPSETLSLTCTVSGGSISSHYWSWIRQP | DIQMTQSPSSLSASVGDRVTITCRASQGISNYLAWYQQ |
| 009335 | PGKGLEWIGYIYYSGSTNYNPSLKSRVTISVDTSKNQFSL | KPGKVPKLLIYAASTLQSGVPSRFSGSGSGTDFTLTIS |
| | KLSSVTAADTAVYYCARVRREWLAAYFYYGMDVWGQGTTV | SLQPEDVATYYCQKYNSAPLTFGGGTKVEIK |
| | TVSS (SEQ ID NO: 1476) | (SEQ ID NO: 1711) |
| AB- | QVQLVQSGGGVVQPGRSLRLSCAASGFSFSSYAMHWVRQA | EIVLTQSPGTLSLSPGERATLSCRASQSLGSSYLAWYQ |
| 009336 | PGKGLEWVAVISFDQTTKYYADSVKGRFTISKDNSKNMLY | QKPGQTPRLLIYGASTRATGIPDRFSGSGSGTDFTLTI |
| | LQMNTLRAEDTAVYYCARQEDYDYVWGIFRPRGWYIDLW | SRLEPEDFAMYYCQQYDSPPPYTFGQGTKLEIK |
| | GRGTLVTVSS (SEQ ID NO: 1477) | (SEQ ID NO: 1712) |
| AB- | EVQLLESGGGLVQPGGSLRLSCAASGFTFSSYAMSWVRQA | EIVMTQSPATLSVSPGERATLSCRASQSVSSNLAWYQQ |
| 009337 | PGKGLEWVSAISGSGGSTYYADSVKGRFTISRDNSKNTLY | KPGQAPRLLIYGASTRATGIPARFSGSGSGTEFTLTIS |
| | LQMNSLRAEDTAVYYCAKTTGVTMIVVVIEGGYFDYWGQG | SLQSEDFAVYYCQQYNNWLSYTFGQGTKLEIK |
| | TLVTVSS (SEQ ID NO: 1478) | (SEQ ID NO: 1713) |
| AB- | QVQLVESGGGVVQPGRSLRLSCAASGFTFSSYGMHWVRQA | QSALTQPASVSGSPGQSITISCTGTSSDVGGYNYVSWY |
| 009338 | PGKGLEWVAVIWYDGSNKYCADSVKGRFTISRDTSKNTLY | QQHPGKAPKLMIYDVSNRPSGVSNRFSGSKSGNTASLT |
| | LQMNSLRAEDTAVYYCAREAKPAGGRSFTIFGVATYYYYM | ISGLQAEDEADYYCSSYTSSSTLIFGGGTKLTVL |
| | DVWGKGTTVTVSS (SEQ ID NO: 1479) | (SEQ ID NO: 1714) |
| AB- | QVQLQESGPGLVKPSETLSLTCTVSGGSISSHYWSWIRQP | EIVLTQSPGTLSLSPGERATLSCRASQSVSSSYLAWYQ |
| 009339 | PGKGLEWIGYIYYSGSTNYNPSLKSRVTISVDTSKNQFSL | QKPGQAPRLLIYGASSRATGIPDRFSGSGSGTDFSLTI |
| | KLSSVTAADTAVYYCARAPRGWLQLSPYYFDLWGRGTLVT | SRLEPEDFAVYYCHQYGSSPTFGQGTKVEIK |
| | VSS (SEQ ID NO: 1480) | (SEQ ID NO: 1715) |
| AB- | QVQLVQSGAEVKKPGASVKVSCKVSGYTLTELSMHWVRQ | QSALTQPASVSGSPGQSITISCTGTSSDVGGYNYVSWY |
| 009340 | APGKGLEWMGGFDPEDGETIYAQKFQGRVTMTEDTSTDTA | QQHPGKAPKLMIYDVSKRPSGVSNRFSGSKSGNTASLT |
| | YMELSSLRSEDTAVYYCATAFAYCGGDCYYPSYWGQGTL | ISGLQAEDEADYYCCSYAGSSSPWVFGGGTKLTVL |
| | VTVSS (SEQ ID NO: 1481) | (SEQ ID NO: 1716) |
| AB- | QLQLQESGPGLVKPSETLSLTCTVSGGSISSSSYYWGWIR | EIVMTQSPATLSVSPGERATLSCRASQSVSSNLAWYQQ |
| 009341 | QPPGKGLEWIGSIYYSGSTYYNPSLKSRVTISVDTSKNQF | KPGQAPRLLIYGASTRATGIPARFSGSGSGTEFTLTIS |
| | SLKLSSVTAADTAVYYCARQMPNRPMIVVVTIRGWFDPWG | SLQSEDFAVYYCQQYNNWPRTFGQGTKVEIK |
| | QGTLVTVSS (SEQ ID NO: 1482) | (SEQ ID NO: 1717) |
| AB- | EEQLLESGGDLVQPGGSLRLSCAASGFTFSTYAMSWVRQA | ETVMTQSPATLSVSPGEGATLSCRASQSVSSNLAWYQ |
| 009342 | PGKGLEWVSAISGGGHFTYYADSVEGRFTISRDNSKNTLY | QKPGQAPRLLIYGASTRATGFPARFSGSGSGTEFTLTI |
| | LQMDRLRADDTAVYYCAKDPRLVTTGWYYDLWGRGTLVTV | SSMQSEDFAVYFCQQYHNWPPAFGPGTRVEIK |
| | SS (SEQ ID NO: 1483) | (SEQ ID NO: 1718) |
| AB- | QAQLVESGGGVVQPGRSLRLSCAASGFTFNNHGMHWVRQ | SYELTQPPSMSVSPGQTASITCSGYILGDVSASWYQQK |
| 009343 | VPGKGLEWVAVISYEGSKKDYADSVKGRFSISRDNSKQTV | PGQSPVLIIYQDTKRPSGIPDRFSGSDSGNTATLTISG |
| | YLQMNSLRVEDTAVYYCAKDAAIFMIYPSRYFDLWGRGTL | TQATDEADYYCQAWDSRTHVVFGGGTKLTVL |
| | LTVSS (SEQ ID NO: 1484) | (SEQ ID NO: 1719) |
| AB- | EVQLVESGGGLVKPGGSLRLSCAASGFTFSSYSMNWVRQA | EIVLTQSPGTLSLSPGERATLSCRASQSVSSSYLAWYQ |
| 009344 | PGKGLEWVSSISSSSSYIYYADSVKGRFTISRDNAKNSLY | QKPGQAPRLLIYGASSRATGIPDRFSGSGSGTDFTLTI |
| | LQMNSLRAEDTAVYYCARGWYQLLLPYYYMDVWGKGTTVT | SRLEPEDFAVYYCQQYGSSPPKYTFGQGTKLEIK |
| | VSS (SEQ ID NO: 1485) | (SEQ ID NO: 1720) |
| AB- | QVQLVESGGGVVQPGRSLRLSCAASGFSFSTYAMHWVRQA | DIQMTQSPSSLSASVGDRVTITCRASQSISTYLNWYQQ |
| 009345 | PGKGLEWVAFMSYDGRNEYYADSVKGRFTTSRDNSKNTL | KPGKAPKLLIYAASSLQSGVPSRFSARGSGADFTLTIS |
| | YLQMNSLRTEDTAVYYCARVPGGVLGTFDIWGQGTMVTV | LSQPEDFATYFCQQSYSAPPTFGQGTKVEIK |
| | SS (SEQ ID NO: 1486) | (SEQ ID NO: 1721) |
| AB- | EVQLVESGGGVVRPGGSLRLSCAASGFTFDDYGMSWVRQA | QSALTQPRSVSGSPGQSVTISCTGTSSDVGGYNYVSWY |
| 009346 | PGKGLEWVSGINWNGGSTGYADSVKGRFTISRDNAKNSLY | QQHPGKAPKLMIYDVSKRPSGVPDRFSGSKSGNTASLT |
| | LQMNSLRAEDTALYYCARWPLLGISGYYHYYMDVWGKGT | ISGLQAEDEADYYCCSYAGSYTLLFGGGTKLIVL |
| | TVTVSS (SEQ ID NO: 1487) | (SEQ ID NO: 1722) |
| AB- | EVQLVESGGGLVQPGGSLRLSCGASSFIFSRYAMHWVRQA | QPVLTQPPSASASLGASVTLTCTLSSGYYSYKVDWYQ |
| 009347 | PGKGLEYVSTISSNGSNTYYAKSVKDRFIISRDNSKSTLY | QRPGKGPRFVMRVGTGGIVKAKGDGIPDRFSVLGSGL |
| | LQMGSLRVEDMAVYYCARSPGLAIHSSTSLDVWGKGTTVT | NRSLTIKDIQEEDEGDYHCGADHGSGGNFVWVFGGGT |
| | VSS (SEQ ID NO: 1488) | KLTVL (SEQ ID NO: 1723) |
| AB- | QVTLKESGPVLVKPTETLTLTCTVSGFSLSNARMGVSWIR | EIVLTQSPGTLSLSPGERATLSCRASQSVSSSYLAWYQ |
| 009348 | QPPGKALEWLAHIFSNDEKSYSTSLKSRLTISKDTSKSQV | QKPGQAPRLLIYGASSRATGIPDRFSGSGSGTDFTLTI |
| | VLTMTNMDPVDTATYYCARIRAQWLTFYYYMDVWGKGTTV | SRLEPEDFAVYYCQQYGSSPPYTFGQGTKLEIK |
| | TVSS (SEQ ID NO: 1489) | (SEQ ID NO: 1724) |
| AB- | QVQLVESGGGVVQPGRSLRLSCAASGFSFSTHGMHWVRQA | DIQMTQSPSSVSASVGDRVTITCRASQGISSRLAWYQQ |
| 009349 | PGKGLEWVAAIWYDGSNENYADSVRGRFTISRDNSKNILY | KPGKAPKLLIYASSTLQSGVPSRFSGSGSGTDFTLTIS |
| | LQMSSLRAEDTAIYYCARNHIPGSSLGFDPWGQGTLVTVS | SLQPEDFATYYCQQASSLPYTFGQGTKLEIK |
| | S (SEQ ID NO: 1490) | (SEQ ID NO: 1725) |
| AB- | EVQLVESGGGLVQPGRSLRLSCTVSGFIIDDYAMSWVRQA | SSELTQDAAVSVALGQTVKITCQGDSLRRYYASWYQQ |
| 009350 | PGKGLEWVGFIRSKTYGGTTEYAASVKGRFTISRDDSKGI | KPGQAPVLVMYGKNKRPSGIPDRFSVSTSLTTASLTIT |
| | VYLQMNSLQTQDTGVYYCTKDGRYDWNFILDSYYYYYMDV | GAQAEDEADYYCNSRDTSGDHRVFGGGTKLTVL |
| | WGKGTTVTVSS (SEQ ID NO: 1491) | (SEQ ID NO: 1726) |
| AB- | QGQLVQSGAEVRKPGSSVKVSCKASGGTLSTYAISWVRQA | SYVLTQPPSLSVAPGKTATITCGKNNIESESVHWYQSK |
| 009351 | PGQGLEWMGRITPIFGTTNYAQKFQGRVTITADESTSTAY | PGQAPVLVVYDDSDRPSGIPERFSGSNSGNTATLTISR |
| | MEVSSLRFEDTAVYYCARGASGWFGMDVWGQGTTVTVSS | VEAGDEADYYCQVWDSTGVHVVFGGGTKLTVL |
| | (SEQ ID NO: 1492) | (SEQ ID NO: 1727) |
| AB- | EVRLVQSATEMKKPGASVKISCKTSGYMFSKFGISWVRLA | DILLTQSPATLSLSPGARVTLSCRASQNVGENFAWYQR |
| 009352 | PGRGLEWMGWITPYNSDTVYAQNFQGRLTVTLDRAATTVS | RPGQSPRLLIYGKSIRATDVPARFSGSGSGTEFTLAIS |
| | LELHNLRSDDTGRYYCARDPWRDCSSCWGQGTLLTVSS | SLQSEDFAVYYCQQYDLFPWTFGQGTTIEFK |
| | (SEQ ID NO: 1493) | (SEQ ID NO: 1728) |
| AB- | QAQLVQSGAEVKKPGASVKVSCKASGYAFGSSDINWVRQA | EIVLTQSPGTLSLSPGERATLSCRASQSVSNSYLAWYQ |
| 009353 | TGQGLEWMGWMHPDSGNTVYAQNFQDRVTMTRDTSTST | QKPGQAPRLVIYGASSRATGIPDRFSGSGSGTDFTLTI |
| | AYMELRSLRSDDTAVYYCARGPRLVRFLQWSLNYMDVWG | SRLEPEDFAVYYCQQYGSSRGITFGQGTRLEIK |
| | KGTTVTVSS (SEQ ID NO: 1494) | (SEQ ID NO: 1729) |
| AB- | EVQLVESGGGLVQPGGTLRLSCVASGFNFSNYGMSWVRQA | DVVMTQTPLSLSVTPGQPASISCKSSQSLLHSDGKTFL |
| 009354 | PGKGLEWVSAISGGGDGASYADSVKGRFTISRDNSKNTLY | YWYLQKPGQPPQLLIYEVSNRFSGVPDRFTGSGSGTDF |
| | LQMNSLRADDTAVYYCAKIADWGQGTLVTVSS | TLKISRVEAEDVGVYYCMQSIQLPLTFGGGTKVEIK |
| | (SEQ ID NO: 1495) | (SEQ ID NO: 1730) |
| AB- | QLQLQESGPGLVKPSETLSLTCTVSSGSIRSSNYYWGWIR | DIQLTQSPSSLSASVGDRVSITCRASQNIDTYLNWYQQ |
| 009355 | QPPGKGLEWIGSVYDSGRTEYNPSLKSRVTISVDTSKNQF | KPGKAPKLLISAASSLRSGVPSRFSGSGSGTHFTLTIS |
| | SLKLRSVTAADTAVYYCARHAGPHMVRGVMRNNWFDPWGQ | SLQPEDVTTYYCQQSYSIPWTFGQGTKVEIR |
| | GSLVSVSS (SEQ ID NO: 1496) | (SEQ ID NO: 1731) |
| AB- | QVQLVQSGAEVKKPGASVKVSCKASGYTFVDYAIHWVRQ | EIVMTQSPAILSVSPGERATLSCRASQSVANNLAWYQQ |
| 009356 | APGQGLEWMGWIHAGNGNTKDSEKFQGRVTITRDTSANTV | KPGQAPRLVIFTASTRAPGVPDRFSASGSGTEFTLTIN |
| | FLELSSLRSEDTAVYYCAIAAAGTQVVWGQGTLVTVSS | SLQSEDFAVYYCQQYYDWPPVTFGGGTKVEIK |
| | (SEQ ID NO: 1497) | (SEQ ID NO: 1732) |
| AB- | QLQLQESGPGLVKPSETLSLTCTVSGGSISSSSYYWGWIR | DIQMTQSPSSVSASVGDRVTITCRASQGISSWLAWYQQ |
| 009357 | QPPGKGLEWIGSIYYSGSTYYNPSLKSRVTISVDTSKNQF | KPGKAPKLLIYAASSLQSGVPSRFSGSGSGTDFTLTIS |
| | SLKLSSVTAADTAVYYCARHPLSSITIFGVVKREYYFDYW | SLQPEDFATYYCQQANSFPLLFGGGTKVEIK |
| | GQGTLVTVSS (SEQ ID NO: 1498) | (SEQ ID NO: 1733) |
| AB- | QVHLVQSGAEVKKPGASVKISCKASGYTFTSYYVHWVRQA | QSALTQEASVSATVGQKVTLSCTGNTNNIGGYAVGW |
| 009358 | PGQGLEWMGIIKPSGAGTIYAQKFQGRVTMTRDTSTSTVY | HQQISHGAPKTVMFGNSLPSGIPDRFSGSKSGTTASLI |
| | MELSSLISEDTAVYYCARGGGVTDRDYWGQGTLVTVSS | ISGLQPEDEADYYCSTWDSSLGAVLFGGGTKLTVL |
| | (SEQ ID NO: 1499) | (SEQ ID NO: 1734) |
| AB- | GVQLVQSGAEVKKPGDSLKISCKGFGYRYTNYWVAWVRQ | QSVLTQPPSVSGAPGQGVTISCTGTSSNIGAGYGVHWY |
| 009359 | MPGKGLEWLGIIYPADSDTRYSPSFQGQVTISADKSITTA | QQFPGTAPILIIYDNTNRPSGVPDRFSGSRSGASASLA |
| | YLQWKSLKASDTAIYYCARSFEYCTGTTCQSWFDFWGQGT | ITDLQADDEADYYCHSYDTTLSGQGVFGGGTKLTVL |
| | LVTVAS (SEQ ID NO: 1500) | (SEQ ID NO: 1735) |
| AB- | QVQLVQSGAEVKKPGASVKVSCKASGYTFTSYDINWVRQA | SYELTQPPSVSVSPGQTASITCSGDKLGDKYACWYQQ |
| 009360 | TGQGLEWMGWMNPNSGNTGYAQKFQGRVTMTRNTSISTA | KPGQSPVLVIYQDSKRPSGIPERFSGSNSGNTATLTIS |
| | YMELSSLRSEDTAVYYCARGRAYQLLFNYYYYMDVWGKG | GTQAMDEADYYCQAWDSSTVVFGGGTKLTVL |
| | TTVTVSS (SEQ ID NO: 1501) | (SEQ ID NO: 1736) |
| AB- | EVQLVESGGGLAQPGGTLRLSCTGYGFIFNNYGLTWVRQA | QSVLAQPPSASETPGQSVTISCSGSTSNIGSNFVYWYQ |
| 009361 | PGKGLEWLSVLSGSSYIKYEADSVRGRFTISRDNSKNTLY | QLPGTAPKLLIYRNTQRPSGVPDRFSGSKSATSASLAI |
| | LEMNSLTAEDTAVYYCARKGVGSQDYGLDVWGQGTTVIVS | SGLRPEDEADYYCAAWDDSLSGGVFGTGTKVTVL |
| | S (SEQ ID NO: 1502) | (SEQ ID NO: 1737) |
| AB- | QVQLVQSGAEVKKPGASVKVSCKASGYTFTSYYMHWVRQ | SYELTQPPSVSVSPGQTARITCSGDALPKQYAYWYQQ |
| 009362 | APGQGLEWMGIINPSGGSTSYAQKFQGRVTMTRDTSTSTV | KPGQAPVLVIYKDSERPSGIPERFSGSSSGTTVTLTIS |
| | YMELSSLRSEDTAVYYCARDPTTVTTYDYYYGMDVWGQGT | GVQAEDEADYYCQSADSSGTFVVFGGGTKLTVL |
| | TVTVSS (SEQ ID NO: 1503) | (SEQ IDNO: 1738) |
| AB- | EVQLLESGGGLVQPGGSLRLSCAASGFTFSSFAMTWIRQA | DIVMTQSPDSLAVSLGERATLNCKSSQSVLYSSNNKNY |
| 009363 | PGKGLEWISAIGGDGGATYYVDSIKGRFTISRDNSKNTVY | LAWYQQKPGQPPKLLFYWASTRQSGVPDRFSGSGSGT |
| | LHMNGLRVEDTAVYYCATPSPTRYSWGQGTLVTVSS | DFTLTISSLQAEDGAVYYCQQYHKTPHTFGQGTKLEIK |
| | (SEQ ID NO: 1504) | (SEQ ID NO: 1739) |
| AB- | QVQLVESGGGVVQPGRSLRLSCAASGFTFSSYAMHWVRQA | DVVMTQSPLSLPVTLGQPASISCRSSQSLVHSDGNTYL |
| 009364 | PGKGLEWVAVISYDGSNKYYADSVKGRFTISRDNSKNTLY | NWFQQRPGQSPRRLIYKVSNRDSGVPDRFSGSGSGTDF |
| | LQMNSLRAEDTAVYYCARDPDYYDSSSDAFDIWGQGTMV | TLKISRVEAEDVGVYYCMQGTHWPPWTFGQGTKVEIK |
| | TVSS (SEQ ID NO: 1505) | (SEQ ID NO: 1740) |
| AB- | QVQLVQSGAEVKKPGASVKVSCKVSGYTLTELSMHWVRQ | DIMMTQTPLSSPVTLGQPASISCRSSQSLVHSDGNTYL |
| 009609 | APGKGLEWMGGFDPEDAETIYAQKFQGRVTMTEDTSTDTA | SWLQQRPGQPPRLLIYKISNRFSGVPDRFSGSGAGTDF |
| | YMELSSLRSEDTAVYYCATALAVTGTSDSYYYYYGMDVW | TLKISRVEAEDVGVYYCMQATQFPWTFGQGTKVEIK |
| | GQGTTVTVSS (SEQ ID NO: 1506) | (SEQ ID NO: 1741) |
| AB- | QVTLRESGPALVKPTQTPTLTCTFSGFSLSTSGMCVSWIR | DIQMTQSPSSLSASVGDRVTITCRASQSISSYLNWYQQ |
| 009611 | QPPGKALEWLARIDWDDDKYYSTSLKTRLTISKDTSKNQV | KPGKAPKLLIYAASSLQSGVPSRFSGSGSGTDFTLTIS |
| | VLTMTNMDPVDTATYYCAREGVATISLDYWGQGTLVTVSS | SLQPEDFATYYCQQSYSTPRTFGQGTKVEIK |
| | (SEQ ID NO: 1507) | (SEQ ID NO: 1742) |
| AB- | QVTLRESGPALVKPTQTLTLTCTFSGFSLSTSGMCVSWIR | DIQMTQSPSSLSASVGDRVTITCRASQSISSYLNWYQQ |
| 009612 | QPPGKALEWLARIDWDDDKYYSTSLKTRLTISKDTSKNQV | KPGKAPKLLIYAASSLQSGVPSRFSGSGSGTDFTLTIS |
| | VLTMTNMDPVDTATYYCARTQANRVAFDIWGQGTMVTVSS | SLQPEDFATYYCQQSYSTPRTFGQGTKVEIK |
| | (SEQ ID NO: 1508) | (SEQ ID NO: 1743) |
| AB- | QVQLVESGGGVVQPGRSLRLSCAASGFTFSSYGMHWVRQA | EIVMTQSPATLSVSPGERATLSCRASQSVSSNLAWYQQ |
| 009614 | PGKGLEWVAVISYDGSNKYYADSVKGRFTISRDNSKNTLY | KPGQAPRLLIYGASTRATGIPARFSGSGSGTEFTLTIS |
| | LQMNSLRAEDTAVYYCAKDQKYYDILTGYYRSTYYYYYY | SLQSEDFAVYYCQQYNNWPPLTFGGGTKVEIK |
| | GMDVWGQGTTVTVSS (SEQ ID NO: 1509) | (SEQ ID NO: 1744) |
| AB- | QVQLVESGGGVVQPGRSLRLSCAASGFTFSSYGMHWVRQA | DIQMTQSPSSLSASVGDRVTITCQASQDISNYLNWYQQ |
| 009615 | PGKGLEWVAVIWYDGSNKYYADSVKGRFTISRDNSKNTLY | KPGKAPKLLIYDASNLETGVPSRFSGSGSGTDFTFTIS |
| | LQMNSLRAEDTAVYYCAKVGSPYCSGGSCYSGYFDYWGQ | SLQPEDIATYYCQQYDNLPPLTFGGGTKVEIK |
| | GTLVTVSS (SEQ ID NO: 1510) | (SEQ ID NO: 1745) |
| AB- | QVQLVESGGGVVQPGRSLRLSCAASGFTFSSYGMHWVRQA | SYVLTQPPSVSVAPGKTARITCGGNNIGSKSVHWYQQ |
| 009616 | PGKGLEWVAVISYDGSNKYYADSVKGRFTISRDNSKNTLY | KPGQAPVLVVYDDSDRPSGIPERFSGSNSGNTATLTIS |
| | LQMNSLRAEDTAVYYCAKSPEGAAAGTGYFDYWGQGTLV | RVEAGDEADYYCQVWDSSSDPWVFGGGTKLTVL |
| | TVSS (SEQ ID NO: 1511) | (SEQ ID NO: 1746) |
| AB- | QVQLVQSGAEVKKPGASVKVSCKVSGYTLIELSMHWVRQ | QSALTQPASVSGSPGQSITISCTGTSSDVGGYNYVSWY |
| 009619 | APGKGLEWMGGFDPEDGETIYAQKFQGRVTMTEDTSTDTA | QQHPGKAPKLMIYDVSNRPSGVSNRFSGSKSGNTASLT |
| | YMELSSLRSEDTAVYYCATGPAAATSGWFDPWGQGTLVT | ISGLQAEDEADYYCSSYTSSSTRVFGGGTKLTVL |
| | VSS (SEQ ID NO: 1512) | (SEQ ID NO: 1747) |
| AB- | QITLKESGPTLVKPTQTLTLTCTFSGFSLSTSGVGVGWIR | QSALTQPASVSGSPGQSITISCTGTSSDVGAYNYVSWY |
| 009620 | QPPGKALEWLALIYWDDDKRYSPSLKSRLTITKDTSKNQV | QQHPGKAPKLMIYEVSNRPSGVSNRFSGSKSGNTASLT |
| | VLTMTNMDPVDTATYYCAHHEVATVFDYWGQGTLVTVSS | ISGLQAEDEADYYCSSYTSSSTVFGGGTKLTVL |
| | (SEQ ID NO: 1513) | (SEQ ID NO: 1748) |
| AB- | QVQLQQWGAGLLKPSETLSLTCAVYGGSFSGYYWSWIRQP | SSELTQDPAVSVALGQTVRITCQGDSLRSYYASWYQQ |
| 009629 | PGKGLEWIGEINHSGSTNYNPSLKSRVTISVDTSKNQFSL | KPGQAPVLVIYGKNNRPSGIPDRFSGSSSGNTASLTIT |
| | KLSSVTAADTAVYFCARGTGIAVAGVLVNFYYCYYMDVWG | GAQAEDEADYYCNSRDSSGNHLVFGGGTKLTVL |
| | KGTTVTVSS (SEQ ID NO: 1514) | (SEQ ID NO: 1749) |
| AB- | EVQLVESGGGLVQPGGSLRLSCAASGFNFSFYWMSWVRQA | SYELTQPPSVSVSPGQTASITCSGDKLGDKYACWYQQ |
| 009631 | PGKGLEWVANIKQDGSEKYYVDSVKGRFTISRDNAKNSLY | KPGQSPVVVIYQDSKRPSGIPERFSGSNSGNTATLTIS |
| | LQMNSLRAEDTAVYYCARLSGGSWYFDYWGQGTLVTVSS | GTQAMDEADYYCQAWDSSTGVFGGGTKLTVL |
| | (SEQ ID NO: 1515) | (SEQ ID NO: 1750) |
| AB- | QVQLQESGPGLVKPSETLSLTCTVSGGSISSYYWSWIRQP | EIVLTQSPGTLSLSPGERATLSCRASQSVGSIYLAWYQ |
| 009633 | PGKGLEWIGYIYYSGSTNYNPSLKSRVTISVDTSKNQFSL | QKPGQAPRLLIYGASSRATGIPDRFSGSGSGTDFTLTI |
| | KLSSVTAADTAVYYCARGFDYWGQGTLVTVSS | SRLEPEDFAVYYCQQYGSSLTWTFGQGTKVEIK |
| | (SEQ ID NO: 1516) | (SEQ ID NO: 1751) |
| AB- | QVTLKESGPALVKPTQTLTLTCTFSGFSLSTSGMRVSWIR | DIVMTQSPDSLAVSLGERATINCKSSQSVLYSSNNKNY |
| 009634 | QPPGKALEWLARIDWDDDKFYSTSLKTRLTISKDTSKNQV | LAWYQQKPGQPPKLLIYWASTRESGVPDRFSGSGSGT |
| | VLTMTNMDPVDTATYYCARYYYYGMDVWGQGTTVTVSS | DFTLTISSLQAEDVAVYYCQQYYSTLWTFGQGTKVEIK |
| | (SEQ ID NO: 1517) | (SEQ ID NO: 1752) |
| AB- | EVQLVESGGGLVKPGGSLRLSCAASGFTFSNAWMSWVRQA | SYELTQPPSVSVSPGQTARITCSGDALPKKYAYWYQQ |
| 009635 | PGKGLEWVGRIKSKTDGGTTDYAAPVKGRFTISRDDSKNT | KSGQAPVLVIYEDSKRPSGIPERFSGSSSGTMATLTIS |
| | LYLQMNSLKTEDTAVYYCTTGRYYYDSSGYANDAFDIWGQ | GAQVEDEADYYCYSTDSSGNHRVFGGGTKLTVL |
| | GTMVTVSS (SEQ ID NO: 1518) | (SEQ ID NO: 1753) |
| AB- | QVQLVQSGAEVKKPGSSVKVSCKASGGTFSSYAISWVRQA | DIVMTQSPLSLPVTPGEPASISCRSSQSLLHSNGYNYL |
| 009637 | PGQGLEWMGGIIPILGTANYAQKFQGRVTITADKSTSTAY | DWYLQKPGQSPQLLIYLGSNRASGVPDRFSGSGSGTDF |
| | MELSSLRSEDTAMYYCAREGGFYGSGRNFDYWGQGTLVTV | TLKISRVEAEDVGVYYCMQALQTPYTFGQGTKLEIK |
| | SS (SEQ ID NO: 1519) | (SEQ ID NO: 1754) |
| AB- | QVQLVESGGGLVKPGGSLRLSCAASGFTFSDYYMSWIRQA | SYELTQPPSVSVSPGQTARITCSGDALPKQYAYWYQQ |
| 009638 | PGKGLEWVSYISSSGSTIYYADSVKGRFTISRDNAKNSLY | KPGQAPVLVIYKDSERPSGIPERFSGSSSGTTVTLTIS |
| | LQMNSLRAEDTAVYYCARDSTRYCSSTSCSSYYYGMDVWG | GVQAEDEADYYCQSADSSGTWVFGGGTKLTVL |
| | QGTTVTVSS (SEQ ID NO: 1520) | (SEQ ID NO: 1755) |
| AB- | QVQLVESGGGVVQPGRSLRLSCAASGFTFSSYAMHWVRQA | DVVMTQSPLSLPVTLGQPASISCRSSQSLVHSDGNTYL |
| 009640 | PGKGLEWVAVISYDGSNKYYADSVKGRFTISRDNSKNTLY | NWFQQRPGQSPRRLIYKVSNRDSGVPDRFSGSGSGTDF |
| | LQMNSLRAEDTAVYYCARDSDDYGDYYFDYWGQGTLVT | TLKISRVEAEDVGVYYCMQGTHWPPWTFGQGTKVEIK |
| | VSS (SEQ ID NO: 1521) | (SEQ ID NO: 1756) |
| AB- | QVQLQQWGAGLLKPSETLSLTCAVYGGSFSGYSWSWIRQP | SSELTQDPAVSVALGQTVRITCQGDSLRSYYASWYQQ |
| 009642 | PGKGLEWIGEINHSGSTNYNPSLKSRVTISVDTSKNQFSL | KPGQAPVLVIYGKNNRPSGIPDRFSGSNSGNTASLTIT |
| | KLSSVTAADTAVYYCAREGRFLEWLLGVNYYYYMDVWGKG | GAQAEDEADYYCHSRDSSGNHLVFGGGTKLTVL |
| | TTVTVSS (SEQ ID NO: 1522) | (SEQ ID NO: 1757) |
| AB- | EVQLVESGGGLVQPGRSLRLSCTASGFTFGDYAMSWVRQA | DIQMTQSPSTLSASVGDRVTITCRASQSISSWLAWYQQ |
| 009643 | PGKGLEWVGFIRSKAYGGTTEYAASVKGRFTISRDDSKSI | KPGKAPKLLIYKASSLESGVPSRFSGSGSGTEFTLTIS |
| | AYLQMNSLKTEDTAVYYCTREDFWSGYSDYWGQGTLVTVS | SLQPDDFATYYCQQYNSYPWTFGQGTKVEIK |
| | S (SEQ ID NO: 1523) | (SEQ ID NO: 1758) |
| AB- | QVQLVESGGGVVQPGRSLRLSCAASGFTFSSYGMHWVRQA | DIQMTQSPSSLSASVRDRVTITCRASQSISSYLNWYQQ |
| 009644 | PGKGLEWVAVISYDGSNKYYADSVKGRFTISRDNSKNTLY | KPGKAPKLLIYAASSLQSGVPSRFSGSGSGTDFTLTIS |
| | LQMNSLRAEDTAVYYCAKDPGITIFGVVYYYYMDVWGKG | SLQPEDFATYYCQQSYSTPHTFGQGTKLEIK |
| | TTVSISS (SEQ ID NO: 1524) | (SEQ ID NO: 1759) |
| AB- | QVQLVESGGGVVQPGRSLRLSCAASGFTFSSYAMHWVRQA | SYELTQPPSVSVSPGQTARITCSGDALPKQYAYWYQQ |
| 009646 | PGKGLEWVAVISYDGSNKYYADSVKGRFTISRDNSKNTLY | KPGQAPVLVIYKDSERPSGIPERFSGSSSGTTVTLTIS |
| | LQMNSLRAEDTAVYYCARACSSTSCYKGDAFDIWGQGTM | GVQAEDEADYYCQSADSSGTYSWVFGGGTKLTVL |
| | VTVSS (SEQ ID NO: 1525) | (SEQ ID NO: 1760) |
| AB- | QVQLVQSGAEVKKPGASVKVSCKASGYTFAGYDINWVRQ | QAVLTQPASLSASPGASASLTCTLRSGINVDSYRIYWY |
| 009647 | APGQGLEWMGWASTKNDNTGYAQKFQGRVTMTRDIFTST | HQKPGSPPQYLLNYKSAADKEQGSGVPSRFSGSKDAS |
| | VFMELSSLNFEDTAVYYCARGVDQGVDYWGQGTLVTVSS | ANAGILIISGLQSEDEADYYCMIWHNSAYFFGTGTKVT |
| | (SEQ ID NO: 1526) | VL (SEQ ID NO: 1761) |
| AB- | EVQLVESGGGLVQPGGSLRLSCAASGFTFSSYWMSWVRQA | SYELTQPPSVSVSPGQTASITCSGDKLGDKYACWYQQ |
| 009649 | PGKGLEWVANIKQDGSEKYYVDSVKGRFTISRDNAKNSLY | KPGQSPVLVIYQDSKRPSGIPERFSGSNSGNTATLTIS |
| | LQMNSLRAEDTAVYYCARDFNDFWSGYYGPSFDYWGQGT | GTQAMDEADYYCQAWDSSTGVFGGGTKLTVL |
| | LVTVSS (SEQ ID NO: 1527) | (SEQ ID NO: 1762) |
| AB- | QVQLVESGGGVVQPGRSLRLSCAASGFTFSSYAMHWVRQA | DIQMTQSPSSLSASVGDRVTITCQASQDISNYLNWYQQ |
| 009650 | PGKGLEWVAVISYDGSNKYYADSVKGRFTISRDNSKNTLY | KPGKAPKLLIYDASNLETGVPSRFSGSGSGTDFTFTIS |
| | LQMNSLRAEDTAVYYCARVWVPKVYYYGMDVWGQGTTV | SLQPEDIATYYCQQYDNLPITFGQGTRLEIK |
| | TVSS (SEQ ID NO: 1528) | (SEQ ID NO: 1763) |
| AB- | QVQLQQWGAGLLKPSETLSLTCAVYGGSFSGYYWSWIRQP | QSALTQPASVSGSPGQSITISCTGTSSDVGSYNLVSWY |
| 009654 | PGKGLEWIGEINHSGSTNYNPSLKSRVTISVDTSKNQFSL | QQHPGKAPKLMIHEGSKRPSGVSNRFSGSKSGNTASLT |
| | KLSSVTAADTAVYYCARSWSSWSYAFDIWGQGTMVTVSS | ISGLQAEDEADYYCCSYAGSSTWVFGGGTKLTVL |
| | (SEQ ID NO: 1529) | (SEQ ID NO: 1764) |
| AB- | EVQLVESGGGLVQPGGSLRLSCAASGFTFSSYWMSWVRQA | SYELTQPPSVSVSPGQTASITCSGDKLGDKYACWYQQ |
| 009655 | PGKGLEWVANIKQDGSEKYYVDSVKGRFTISRDNAKNSLY | KPGQSPVLVIYQDSKRPSGIPERFSGSNSGNTATLTIS |
| | LQMNSLRAEDTAVYYCARDSSDPIGAFDIWGQGTMVTVSS | GTQAMDEADYYCQAWDSSTVVFGGGTKLTVL |
| | (SEQ ID NO: 1530) | (SEQ ID NO: 1765) |
| AB- | EVQLVESGGGLVKPGGSLRLSCAASGFTFSSYSMNWVRQA | SYELTQPPSVSVSPGQTASITCSGDKLGDKYACWYQQ |
| 009657 | PGKGLEWVSSISSSSSYIYYADSVKGRFTISRDNAKNSLY | KPGQSPVLVIYQDSKRPSGIPERFSGSNSGNTATLTIS |
| | LQMNSLRAEDTAVYYCATIPAAMESAYYYYGMDVWGQGTT | GTQAMDEADYYCQAWDSSTVVFGGGTKLTVL |
| | VTVSS (SEQ ID NO: 1531) | (SEQ ID NO: 1766) |
| AB- | EVQLLESGGGLVQPGGSLRLSCAASGFTFSSYAMSWVRQA | DIVMTQTPLSSPVTLGQPASISCRSSQSLVHSDGNTYL |
| 009659 | PGKGLEWVSAISGSGGSTYYADSVKGRFTISRDNSKNTLY | SWLQQRPGQPPRLLIYKISNRFSGVPDRFSGSGAGTDF |
| | LQMNSLRAEDTAVYYCAKRLDYWGQGTLVTVSS | TLKISRVEAEDVGVYYCTQATQFPWTFGQGTKVEIK |
| | (SEQ ID NO: 1532) | (SEQID NO: 1767) |
| AB- | QVQLVESGGGVVQPGRSLRLSCAASGFTFSSYGMHWVRQA | DIVMTQSPDSLAVSLGERATINCKSSQSVLYSSNNKNY |
| 009661 | PGKGLEWVAVISYDGSNKYYADSVKGRFTISRDNSKNTLY | LAWYQQKPGQPPKLLIYWASTRESGVPDRFSGSGSGT |
| | LQMNSLRAEDTAVYYCAKDYGDYGGMDVWGQGTTVTVS | DFTLTISSLQAEDVAVYYCQQYYSTPRFGPGTKVDIK |
| | S (SEQ ID NO: 1533) | (SEQ ID NO: 1768) |
| AB- | QVQLVESGGGVVQPGRSLRLSCAASGFSFRSFGMHWVRQA | SSKLTQDPAVSVALGQTVTITCQGDSLRNYYASWYQQ |
| 009664 | PGKGLEWVALITYDATEKHFGDSVKGRFTISRDNPKNTVY | KPGQAPVLVIYAQNNRPSGIPDRFSGSISGTTASLTIT |
| | LQMNSLTTEDTAVYYCVKDLGYKDNWGQGTLVIVSS | GAQAEDEADYYCNSRDSSGDRLVFGGGTKLTVV |
| | (SEQ ID NO: 1534) | (SEQ ID NO: 1769) |
| AB- | EVQLLESGGGLVQPGGSLRLSCAASGFTFSSYAMSWVRQA | SYELTQPPSVSVSPGQTASITCSGDKLGDKYACWYQQ |
| 009667 | PGKGLEWVSAISGSGGSTYYADSVKGRFTISRDNSKNTLY | KPGQSPVLVIYQDTKRPSGIPERFSGSNSGNTATLTIS |
| | LQMNSLRAEDTAVYYCAKHARRHDYGDYFDYWGQGTLVT | GTQAMDEADYYCQAWDSSTAWVFGGGTKLTVL |
| | VSS (SEQ ID NO: 1535) | (SEQ ID NO: 1770) |
| AB- | QVQLQESGPGLVKPSETLSLTCTVSGGSISSYYWSWIRQP | EIVLTQSPGTLSLSPGERATLSCRASQSVSSNYLAWYQ |
| 009671 | PGKGLEWIGYIYYSGSTYYNPSLKSRVTISVDTSKNQFSL | QKPGQAPRLLIYGASSRATGIPDRFSGSGSGTDFTLTI |
| | KLSSVTAADTAVYYCARALRGIFGVVNWFDPWGQGTLVTV | SRLEPEDFAVYYCQQYGSSPLTFGGGTKVEIK |
| | SS (SEQ ID NO: 1536) | (SEQ ID NO: 1771) |
| AB- | QVQLQQWGAGLLKPSETLSLTCAVYGGSFSGYYWSWIRQP | DIQMTQSPSTLSASVGDRVTITCRASQSVSSYLNWYQQ |
| 009676 | PGKGLEWIGEINHSGSTNYNPSLKSRVTISVDTSKNQFSL | KPGKAPKLLIYAASSLQSGVPSRFSGSGSGTDFTLTIS |
| | KLSSVTAADTAVYYCARLSRQWLVRPHIYYFDYWGQGTLV | SLQPEDFATYFCQQSYSTPRTFGQGTKLEIK |
| | TVSS (SEQ ID NO: 1537) | (SEQ ID NO: 1772) |
| AB- | QVTLRESGPALVKPTQTLTLTCTFSGFSLSTSGMCVSWIR | DIQMTQSPSSLSASVGDRVTITCRASQSISSYLNWYQQ |
| 009677 | QPPGKALEWLARIDWDDDKYYSTSLKTRLTISKDTSKNQV | KPGKAPKLLIYAASSLQSGVPSRFSGSGSGTDFTLTIS |
| | VLTMTNMDPVDTATYYCARSPIAARAGGFDYWGQGTLVTV | SLQPEDFATYYCQQSYSTPRTFGQGTKLEIK |
| | SS (SEQ ID NO: 1538) | (SEQ ID NO: 1773) |
| AB- | QVQLVESGGGVVQPGGSLRFSCAASGFTFSTYGMHWVRQA | QTVVTQEPSFSVSPGGTVTLTCGLSSGSVSTTYYPSWY |
| 009680 | PGKGLEWVAAIWYDGSNKYYADSVKGRFTISRDNSKNTLY | QQTPGQAPRTLIYNTKTRSSGVPDRFSGSILGNKAALT |
| | LQMDSLRAEDTAVYYCARRGVTISYYYMDVWGKGTTVTV | TGAQADDESDYYCVLYMGSGIWVFGGGTKLTVL |
| | SS (SEQ ID NO: 1539) | I (SEQ ID NO: 1774) |
| AB- | QVQLVQSGAEVKKPGSSVKVSCKASGGTFSSYAISWVRQA | EIVLTQSPATLSLSPGERATLSCRASQSVSSYLAWYQQ |
| 009681 | PGQGLEWMGGIIPIFGTANYAQKFQGRVTITADESTSTAY | KPGQAPRLLIYDASNRATGIPARFSGSGSGTDFTLTIS |
| | MELSSLRSEDTAVYYCASVGGDYDLDYWGQGTLVTVSS | SLEPEDFAVYYCQQRSNWPPYTFGQGTKLEIK |
| | (SEQ ID NO: 1540) | (SEQ ID NO: 1775) |
| AB- | QVQLQESGPGLVKPSETLSLTCTVSGGSISSYYWSWIRQP | EIVLTQSPGTLSLSPGERATLSCRASQSVSSSYLAWYQ |
| 009682 | PGKGLEWIGYIYYSGSTNYNPSLKSRVTISVDTSKNQFSL | QKPGQAPRLLIYGASSRATGIPDRFSGSGSGTDFTLTI |
| | KLSSVTAADTAVYYCARGATIFGVVIRPFDYWGQGTLVTV | SRLEPEDFAVYYCQQYGSSPLTFGGGTKVEIK |
| | SS (SEQ ID NO: 1541) | (SEQ ID NO: 1776) |
| AB- | QLQLQESGPGLVKPSETLSLTCTVSGGSISSSSYYWGWIR | DIQMTQSPSSLSASVGDRVTITCRASQSISSYLNWYQQ |
| 009687 | QPPGKGLEWIGSIYYSGSTYYNPSLKSRVTISVDTSKNQF | KPGKAPKLLIYAASSLQSGVPSRFSGSGSGTDFTLTIS |
| | SLKLSSVTAADTAVYYCARHTFGITIFGVVTRTGFDPWGQ | SLQPEDFATYYCQQSYSTPYTFGQGTKLEIK |
| | GTLVTVSS (SEQ ID NO: 1542) | (SEQ ID NO: 1777) |
| AB- | QVQLVESGGGVVQPGRSLRLSCAASGFTFSSYAMHWVRQA | SYELTQPPSVSVSPGQTASITCSGDKLGDKYACWYQQ |
| 009689 | PGKGLEWVAVISYDGSNKYYADSVKGRFTISRDNSKNTLY | KPGQSPVLVIYQDSKRPSGIPERFSGSNSGNTATLTIS |
| | LQMNSLRAEDTAVYYCAREMGSGMDVWGQGTTVTVSS | GTQAMDEADYYCQAWDSSTGVFGGGTKLTVL |
| | (SEQ ID NO: 1543) | (SEQ ID NO: 1778) |
| AB- | DVQLVESGGGLVQPGGSLRLSCAGFRFSTSENYVDWVRRA | DIVMTQSPLSLPVTPGEPASISCRSSQSLLHSNGYNYL |
| 009691 | PGKGLEWVARSKNRASSFATEYAASVKGRFTISRDDSTNS | VWYLQKPGQSPQLLIYFGSNRASGVPDRFSGSGSGTDF |
| | VSLQMNSLKIEDTALYYCAGSIAVAGAIWGQGTMVTVSS | TLRISRVEAEDVGVYYCMQSLQTPVTFGGGTKVEIK |
| | (SEQ ID NO: 1544) | (SEQ ID NO: 1779) |
| AB- | QVQLVESGGGVVQPGRSLRLSCAASGFTFSSYAMHWVRQA | DIQMTQSPSTLSASVGDRVTITCRASQSISSWLAWYQQ |
| 009695 | PGKGLEWVAVISYDGSNKYYADSVKGRFTISRDNSKNTLY | KPGKAPKLLIYKASSLESGVPSRFSGSGSGTEFTLTIS |
| | LQMNSLRAEDTAVYYCARARGGNYYYGMDVWGQGTTVT | SLQPDDFATYYCQQYNSYSWTFGQGTKVEIK |
| | VSS (SEQ ID NO: 1545) | (SEQ ID NO: 1780) |
| AB- | QLQLQESGPGLVKPSETLSLTCTVSGGSISSSSYYWGWIR | QSALTQPASVSGSPGQSITISCTGTSSDVGGYNYVSWY |
| 009697 | QPPGKGLEWIGSIYYSGSTYYNPSLKSRVTISVDTSKNQF | QQHPGKAPKLMIYDVSNRPSGVSNRFSGSKSGNTASLT |
| | SLKLSSVTAADTAVYYCASREVVLRYFDWSSPMGGFDPWG | ISGLQAEDEADYYCSSYTSSSTVVFGGGTKLTVL |
| | QGTLVTVSS (SEQ ID NO: 1546) | (SEQ ID NO: 1781) |
| AB- | ELQLVETGGGLVQPGGTLTISCAASGFTLNTYAMSWVRQA | ENVLTQSPGTLSLFPGERATLSCGASRSLGSNYLAWYQ |
| 009703 | PGKALEWVASSSGTGATTNYADSVNGRFSISRDNRRNTLF | QKPGQAPRLLIYGAFHRANGIPDRFSGSGSGTDFTLTI |
| | LQMDNLRADDTALYYCVRDGYNMIPFDMWGQGTMVTVSS | SRLEPEDFAVYYCQQYNSSPYTFGQGTKLELK |
| | (SEQ ID NO: 1547) | (SEQ ID NO: 1782) |
| AB- | QVQLQQWGAGLLKPSETLSLTCAVSGGSFSGYYWSWIRQV | LPVVTQAPSASALLGTSIKLTCTLSSEHSTYTIDWYQQ |
| 009706 | PDKGLEWIGEINHAGSLSYNPSLKSRVSMTDDTPKKQFFL | RPGRSPRHIMKIKSDGSHIKGGDIPDRFTGSSSGADRY |
| | KLTSLTAADSGVYYCVRWGPVGNTWAFDYWGPGTAVIVSS | LIISNLQPDDEAEYHCGQSHTNNGQAGVVFGGGTKLTV |
| | (SEQ ID NO: 1548) | L (SEQ ID NO: 1783) |
| AB- | QVQLQESGPGLVTPSGTLSLTCGVSGDSIYSDYWWTWVRQ | QTVVTQEPSLSVSPGGTVTLTCGLSSGSVSAHYFPTWY |
| 009707 | SPGKGLEWIGEVYRSGTRQYSPSLESRVTISIDTSGNQFS | FQTPGQPPRTLIYRTNTRSSGVPDRFSGSVLGDKAALT |
| | LNLISVTAADTAVYYCAAMRDGYGSGWLWGQGTLVTVSS | ITGAQADDEADYYCALSMNSGSFWVFGGGTKLTVL |
| | (SEQ ID NO: 1549) | (SEQ ID NO: 1784) |
| AB- | QVQLQQWGAGRLKPSETLSLTCAVYGGSLGGYYWTWIRQ | DIVMTQSPDSLAVSLGERATITCKSSQSVLYNSNNKDY |
| 009708 | PPGGGLEWIGESDESGKTDYNPSLKSRVTVSVDTSKNQFS | LAWYQQKPGQPPKLLIYWASTRTSGVPDRFTGSGSGT |
| | LKLTSVTAADTAVYYCARGHTSIYGVLIMLFHASWLDPWG | DFTLTINSLQAEDVAVYYCQQYYTSPRTFGQGTKVEIK |
| | QGTLVTVSS (SEQ ID NO: 1550) | (SEQ ID NO: 1785) |
| AB- | EVQLVESGGGLVQPGGSLRLSCAASGFVFRRYWMHWIRQA | NIVMTQSPLSLPVTPGEPASISCRSSESLVHPNGKTWL |
| 009709 | PGKGLAWVSRTNEDGTITNYADSVKGRFTISRDNTKNTLY | DWYLQKPGQSPQVLIHSASIRASGVPDRFSGSGSGTDF |
| | LQMNDLRVEDTATYFCARDVGGADGHWGQGTLVTVSS | TLKISRVEAEDVGVYYCMQGLQTPYTFGQGTKLEIK |
| | (SEQ ID NO: 1551) | (SEQ ID NO: 1786) |
| AB- | LVQLIQSGAEVVKPGSSVKVSCTASGGSYSSYTLSWVRQA | EIVLTQSPGTLSLSPGERATLSCRASQSVYGSYLAWYQ |
| 009710 | PGQGVEWLGRISPVLNTTYYAQKLEGRVTMTADESTSTVY | QKPGQAPRLLIYGGSSRATGIPDRFSGSGSGTDFTLTI |
| | MQLSSLRSEDTAVYYCARLASMNGVDIWGQGTSVTVSS | SRLEPEDFAVYYCHQYGTSRYSFGQGTKLDIK |
| | (SEQ ID NO: 1552) | (SEQ ID NO: 1787) |
| AB- | QVQLVQSGAEVKRPGASVKVSCKASGYTFTHYYIHWVRQ | ENVLTQSPDTLSVSPGERAALFCRASQSVAGSSFGGSY |
| 009711 | APGQGLEWVGRINPNSGGTHYAQKFQGRVTMTRDTSISTV | LAWYQQRPGQPPRLLIYGASTRATGVPDRFSGSGFGTD |
| | YLELTSLRSDDTALYYCARDSETDTSLAVAYYYYYMDVW | FTLTINRLEPEDIAVYYCQQYDKSPITFGQGTRLEIK |
| | GKGTAVAVSS (SEQ ID NO: 1553) | (SEQ ID NO: 1788) |
| AB- | QVQLVESGGSVVQPGRSLTLSCAASQFIFSSYAMHWVRQA | DIQMTQSPSTLSASVGDRVTITCRASQSIRNWLAWYQQ |
| 009712 | PGEGLEWVAMIYSDSSEKHYADSVKGRFTISRDNSKNTVS | KPGKVPKLLISDASNLKSGVPSRFSGSGFGTEFTLTIN |
| | LQMNSLGAEDTAVYYCAREGREYSDNSGKRGYFDSWGQGT | NLQPDDSASYYCQQYILYWTFGHGTKVEIK |
| | LVTVSS (SEQ ID NO: 1554) | (SEQ ID NO: 1789) |
| AB- | QVQLVESGGGVVQPGRSLRLSCAASGFTLRTYAMHWVRQ | QPVLTQSPSASASLGASVKLTCTLSSGYSTYAIAWHQQ |
| 009713 | APGKGLAWVAIISYSGDTEYDAGSVRGRFTISRDTSKNML | LPGKGPRYLMKLNSDGSHTKGDLIPDRFSGSSSGAERY |
| | YLQMNSLRAEDTGIYYCAREGEDYSSSYFDHWGQGTLVTV | LTISSLQSEDEGDYYCQTWGSGIQVFGGGTKLTVL |
| | SS (SEQ ID NO: 1555) | (SEQ ID NO: 1790) |
| AB- | QVQLQQWGAGLVKPSETLSLTCAVYGGSFSYYSWSWSWIR | SSELTQDPAVSVALGQTVRITCQGDSLRTYYATWYQQ |
| 009714 | QPPGKGLEWIGEIIHRGRTNSNPSLKSRVTVSRDTSKNQF | KPGQAPLLVIYAKNSRPSGIPDRFSGSSSGNTASLTIT |
| | SLNLSSVTAADTAVYYCARHRIVEATFSRYDYFDSWGQGT | GALAEDEADYYCNSRDSSGNYVVFGGGTKLTVL |
| | LVTVSS (SEQ ID NO: 1556) | (SEQ ID NO: 1791) |
| AB- | QVQLQQWGAELLKPSETLSLTCAVYGGSFNNHAWTWLRR | QTVVTQEPSLTVSPGGTVTLTCASSTGAVTSGYYPIWF |
| 009715 | PPGKGLEWIGEVIPHGSTKCDPSLKSRVTMSVDASKNQFS | QQKPGQAPRALIYNTNYRHSWTPARFSGSLLGGKAAL |
| | MKLISVSAADTAVYYCARRSGESNGWGTYYHYGMDVWGQ | TLSSVQPEDEAEFHCLLYYGGAQPWVFGGGTKLTVL |
| | GTTVIVSS (SEQ ID NO: 1557) | (SEQ ID NO: 1792) |
| AB- | QVQLQQWGAGLLKPSETLSLTCAVYGGSFTNYWWRWTW | SSELTQDPGVSVALGQTVRITCQGDSLRSYYASWLQQ |
| 009716 | VRQPPGRGLEWIGEIDRSGTTNYSPSLKSRVTISVDTSKN | KPGQAPVVVINGKNSRPSGIPDRFSGSTSGNTASLSIT |
| | QFSLTVTSVTAADTAVYYCARGRTPTGTFDYYSYLDVWGK | GAQAEDEADYYCNSRDSSGNSVVFGGGTKLTVL |
| | GTTIAVSS (SEQ ID NO: 1558) | (SEQ ID NO: 1793) |
| AB- | QVQLQQWGAGLLKPSETLSLTCAAHGGSFSGYYWSWIRRP | SYEVTQPPSVSVSPGQTASITCSGDELGRKYVSWYQQR |
| 009717 | PGKGLEWIGEITHSGRTNYNPSLTRRLSVFVDTPKSQFSL | PGQSPVLVIYRDNRRPSGIPERFSGSNFGNTATLTISG |
| | KLSSVTAADTATYYCARWDCTDGTCYAVYWGQGTLVTVSS | PQAMDEADYYCQAWDSTTVIFGGGTKLTVL |
| | (SEQ ID NO: 1559) | (SEQ ID NO: 1794) |
| AB- | QVQLQQWGAGLLKASETLSLTCAVYGGSFSNYYWNWIRQ | DIQMTQSPSSLSASVRDRVTITCRASQSISSYLNWYRQ |
| 009718 | SPGKGLEWIGEINYRGNTKYNPSLRSRVTISVDTSKNQFS | KPGKAPELLISAASTLQSGVPSRFSASGSGTDFTLTIS |
| | LKLSSLSAADTALYYCARGLGPPVGSLAITFGGLRRSFDI | SLQPEDFATFYCQQSYSAPFTFGGGTKVEIK |
| | WGQGTMVIVSS (SEQ ID NO: 1560) | (SEQ ID NO: 1795) |
| AB- | QVQLVQSGAEVKKPGASVKVSCKVSGYTLSKLFMHWVRQ | DIQMTQSPSSLSASVGDRVTITCQASQDISNYLNWYQQ |
| 009719 | APGKELEWMGGSVPEDDNTIYAEKFRGRVTMTEDTSTDTA | TPGKAPRLLIYDASNLETGVPSRFSGSGFGTDFTFTIS |
| | YMELSSLRSEDTALYFCATFRRQRGGYYYYGLDLWGQGTS | SLQPEDIATYYCQQADNLPYTFGQGTKLEIK |
| | VTVSS (SEQ ID NO: 1561) | (SEQ ID NO: 1796) |
| AB- | EVHLVESGGGLVQPGRSLRLSCAASGFKFDDYAMHWVRQ | DIVMTQSPLSLPVTPGEPASISCRSSQSLLHNDGYNYL |
| 009720 | GPSKGLEWVAGISWNSGSIDYADSVKGRFTISRDNAKNSL | DWYLQRPGQTPQLLIYLGFHRASGVPDRFSGSGSGTDF |
| | FLEMNSLTTEDTALYYCAKVKLTVFGVEQSPLDSWGQGTL | TLKISRVEAEDFGVYYCVQALQTPLTFGGGTKVEIK |
| | VTVSS (SEQ ID NO: 1562) | (SEQ ID NO: 1797) |
| AB- | EVQLLESGGGLVQPGGSLRLSCAVSGFTFSRYAMAWVRQA | QSVLTQPPSVSGAPGQRVTISCTGSSSNIGAGYDVHWY |
| 009721 | PGKGLEWVSTISDTDGSTIYYTDSVKGRFSISRDNSKNTL | QQLPGTAPKLIIYANNNRPSGVPDRFSASKSGTSASLA |
| | YLQMNSLRAEDTAVYYCTIQARVPSAMKVYFQNWGQGTLV | ITGLQPEDEADYYCQSYDNSLSGSRVFGGGTKLTVL |
| | TVSS (SEQ ID NO: 1563) | (SEQ ID NO: 1798) |
| AB- | QVQLVQSGAEVRKPGSSVKVSCNVSGGIFNSYKITWVRQA | EVVLTQSPATLSLSPGERATLSCRASQSVSSFLGWYQQ |
| 009722 | PGQGLEWMGGIIAIFGTADYAQRFQGRLSITADESTSTAY | KPGQAPRLLIYDASNRASGIPARFSGSGSGTDFTLTIS |
| | MELSSLRSDDTAVYYCTRERFSNYFDPWGQGTLVTVSS | KLEPEDFAVYYCQQRSRGPSGITFGQGTRLEIK |
| | (SEQ ID NO: 1564) | (SEQ ID NO: 1799) |
| AB- | QVQLVQSGAEVKKPGASVKVSCKASGYIFTNYDLSWVRQA | AIHLTQSPSSLSASVRDRVTITCRASQDISSALAWYHQ |
| 009723 | TGQGLEWMGWMNPYSGNTGFSQKFQGRVTMTRNTSISTV | KPGKPPKLLIYDASSLENGVPSRFSGSGSGTDFTLTIS |
| | YMELNSLRSEDTAIYYCARGRDVGQWLVGEGFDYWGQGS | SLQPEDFATYYCQQFNTYPLTFGGGTKVEIK |
| | LVTVSS (SEQ ID NO: 1565) | (SEQ ID NO: 1800) |
| AB- | QVQLVQSGAEVKKPGSSVKVSCKTSGGTFSNNAISWVRQA | DIVLTQTPLSLSVTPGQPASISCKSSQTLLHSDGKTYL |
| 009724 | PGQGLEWMGRIIPMVGVADYAQKLQGRVTLTADKSTTTAF | YWYLQKPGQPPQLLIYEVSNRFSGVPDRFSGSGSGTDF |
| | MELNSLTSEDTAVYYCARGKPFDFWSGLFDSWGQGTRVTV | TLTISRVEAEDVGVYYCMQSIELPPLTFGGGTKVEIK |
| | SS (SEQ ID NO: 1566) | (SEQ ID NO: 1801) |
| AB- | QMQLQESGPGLVKPSETLSLTCTVSHGSIRSQYWSWIRQS | DIQMTQSPSSLSASVGDRVTISCQASQDISNFLNWYQQ |
| 009725 | PGKGLEWIGYIYDSGSSKYNPSLKSRVTISLDTSKNEVYL | KPGEAPKLLIYDASILEAGVPSRFSGSGSGTDFTFSIS |
| | KLNSVTSADTAVYYCARRKVSFPRPSDDSSFDWFFDLWGR | SLQPEDIGTYYCQQYDNLAPLTFGGGTKVEIK |
| | GTLVTVSS (SEQ ID NO: 1567) | (SEQ ID NO: 1802) |
| AB- | EVQLVQSGAEVKEPGESLKISCKASGYTFINYWIGWVRQM | SYELTQPPSVSVSPGQTGRITCSGDELPKQYASWYQQK |
| 009726 | PGKGLEWMGIIYPGDSDTRYSPSFQGQVTISADKSITTAY | PGQAPVLVMYKDTERPSGIPERFSGSSSGTTVTLTISG |
| | LRWNSLKASDTAVYYCAREDIIENERGGFDIWGQGTMVTV | VQAEDEADYYCQSPDSSDTYRVFGGGTKLTVL |
| | SS (SEQ ID NO: 1568) | (SEQ ID NO: 1803) |
| AB- | QVQLVESGGGVVQPGRSLRLSCAASGFTFDNFGFHWVRQA | EIVMTQSPATLSVSPGERATFSCRASQSVGNNVAWYQ |
| 009727 | PGKGLEWVAVISHDGTNEYYGDSVKGRFTISRDDSKNTLF | QKPGQSPRLLIYGASLRATGIPARFSGSGSGTEFTLTI |
| | LQMNSLRTEDTAVYYCGRDRIALAEIDYWGQGTLVTVSS | SSLQSEDFAVYYCQQYNNWPPSITFGQGTRLEIK |
| | (SEQ ID NO: 1569) | (SEQ ID NO: 1804) |
| AB- | EVQLVESGGGLVKPGGSLRLSCGASGFNFNYYGMNWVRQ | SYDLTQPPSVSVSPGQTARITCSGDALPNQYVYWYQQ |
| 009728 | APGKGLEWVSSISSSSSHIYYADSVKGRFAISRDNAKNSL | KPGQAPLMVIFKDKERPSGIPERFSGSSSGTIVTLTIS |
| | YLQMNSLRVDDTGLYFCVRDRSFEYGDYGGDNWGQGTLVT | GVQAEDEADYYCQSADSSGTYPNWVFGAGTKLIVL |
| | VSS (SEQ ID NO: 1570) | (SEQ ID NO: 1805) |
| AB- | QVQLVQSGAEVKKPGASVKVSCKPSGYTFTDYYIHWVRQA | QSALTQPASVSGSPGQSITISCTGTSSDVGGYNYVSWY |
| 009729 | PGQGLEWMGWINPDTSATNYAQNFQGRLTMARDTSISTAY | QQHPGKAPKLMIYEVTNRPSGVSYRFSGSRSGNTASLT |
| | MELSGLRSDDTAVYFCTRVPHYYGSDTYYKPWYYYYAMD | ISGLQAEDEADYYCSSYTSVSTLMLFGGGTKLTVL |
| | VWGQGTTVTVSS (SEQ ID NO: 1571) | (SEQ ID NO: 1806) |
| AB- | QVQLVQSGAEVKRPGSSVKVSCKASGGTFSSYAISWVRQA | DIVMTQTPLSLSVTPGQPASISCKSSQSLLHSAGKTYL |
| 009730 | PGQGLEWMGEIIPVFGAPKFAQKFRGRVTITADESTNTAY | YWYLQKPGQSPQLLIYEVSNRFSGVPDRFSGSGSGTDF |
| | MELNSLRSDDTAVYYCAVGYCSSSSCEPQDAFDIWGQGTM | TLKISRVEAEDVGVYYCMQTIQLPISFGQGTRLGIK |
| | VTVSS (SEQ ID NO: 1572) | (SEQ ID NO: 1807) |
| AB- | QVQLVQSGAEVKKTGASVKLSCKASGYSLTSYAMHWVRQ | QSVLTQPPSASGTPGQRVTISCSGSTSNIGSNYVFWYQ |
| 009731 | APGQRLEWMGWLNGGNGNTKYSQKFQARVTITSDTSART | QFPGTAPKLLIYRNDQRPSGVPDRFSASKAGTSASLAI |
| | VYMELSSLTSEDTAVYYCARADHSTYWYGWFDPWGQGTL | SGLRSEDEADYYCTSWDDSLNGPLFGGGTKLTVL |
| | VTVSS (SEQ ID NO: 1573) | (SEQ ID NO: 1808) |
| AB- | EEQLVESGGVVVQPGGSLRLSCAASGFTFDDYTMHWVRQP | DIQMTQSPSSLSASVGDKVTITCRASQSISTFVNWYQQ |
| 009732 | PGKGLEWVSLISWDGGSKYYADSVMGRFTISRDNSKNSLY | KPGKAPKFLIYDASSLQSGVPSRFSGSGSGTDFALTIS |
| | LQMSSLRTEDTALYYCVKDISSSPANYGFAIWGLGTLVTV | SLQPEDFATYYCQQSFSTLLTFGGGTKVDIK |
| | SS (SEQ ID NO: 1574) | (SEQ ID NO: 1809) |
| AB- | QLQLQESGPGLVKPSETLSLTCTVSGGSISSTANYWGWIR | EIVLTQSPGTLSLSPGEGATLSCRASQSVSSGYLAWYQ |
| 009733 | QPPGKRLEWIGCISYSGRTYDNPSLKSRVTFSVDTSKNQF | HKPGQAPRLLIYGASSRATGIPDRFRGSGSGTDFTLTI |
| | SLKLSSLTAADTAMYYCARHAGWFGEHLDYWGQGTLVTVS | TRLEPEDFAVYYCQQYGSSLTWTFGQGTKVEIK |
| | S (SEQ ID NO: 1575) | (SEQ ID NO: 1810) |
| AB- | QVHLVQSGAEVKTPGASVRVSCKASGYTFTSHYMHWVRQ | EIVLTQSPGTLSLSPGERATLSCRASQTISSRYLAWYY |
| 009734 | APGQGLEWMGLINPSGSGTAYPQHFQGRVTMTRDTSTTTD | QKPGQAPRLLIQGSSIRATGIPDRFSGSGSGTDFTLTI |
| | YMDLSSLRSEDTAMYFCARMERSGAFDLWGQGTMVTVSS | SRLEPEDFAVYYCQHYGSSPPMYTFGQGTKLEIK |
| | (SEQ ID NO: 1576) | (SEQ ID NO: 1811) |
| AB- | QVQLVQSGAEVKKPGSSVKVSCKPSGGTFNSYAFTWVRQA | NFMLTQPHSVSESPGKTVTVSCTRSSGSIASNYVQWYQ |
| 009735 | PGQGLEWMGTVLPIFDTTHSAQKFQGRVTISADKSANTVY | QRPGSAPTTVIYEDNQRPSGVPDRFSGSIDSSSNSASL |
| | MELSSLTSGDTAVYYCVGRYGSGNYEGYWGQGTLVTVSS | TISGLKTEDEAYYYCQSYDSRNPQWVFGGGTTLTVL |
| | (SEQ ID NO: 1577) | (SEQ ID NO: 1812) |
| AB- | QVQLVQSGAEVQKPGSSVKVSCKASGGTFVNFAICWVRQA | DVVMTQSPLSLPVTLGQPASISCRSSESLVHTDGNTYL |
| 009736 | PGQGLEWIGGIIPVFGATNYAQKFRGRVTITADESTSTAY | NWFHQRPGHSPRRLIYKVSNRDSGVPDRFGGSGSGTD |
| | MELSGLTSEDTALYYCAKDLLSDRQDPSWGQGTLVTVSS | FTLKISWVEAEDVGVYYCMQGTHWPWTFGQGTKVEI |
| | (SEQ ID NO: 1578) | K (SEQ ID NO: 1813) |
| AB- | QVTLKESGPVLVKPTETLTLTCTVSGLALSNGRMGVSWIR | EVVMTQSPATLSVSPGERATLSCRASQTFSSNLAWYQ |
| 009737 | QSPGKALEWLAHIFSNDAKSYSTSLKGRLTISKDTSRSQV | QKPGQPPRLLIYGASTRATGVPARFSGSGSGTEFTLTI |
| | VLTMTNMDPVDTATYYCASIDERLGILYWYFHLWGRGSLV | SSLQSEDFAVYYCQQYNDWPRTFGQGTKVEMK |
| | SVSS (SEQ ID NO: 1579) | (SEQ ID NO: 1814) |
| AB- | QVQLVQSGAEVKKPGSSVKVSCKASGGTFTNYAINWVRQA | EIVLTQSPGTLSLSPGERATLSCRASQSISSTYLAWYQ |
| 009738 | PGQGLEWMGGIIPVFGAPNYAQKFQGRVTITADTSTSTAY | QKPGQAPRLLIYGASSRATGIPDRFSGTGSGTDFTLTI |
| | MELSSLRSEDTAVYYCARVGYCSTTGCDMGGLDYWGQGTL | SRLEPEDFAVYYCQQYGVSPNTFGGGTKVEIK |
| | VTVSS (SEQ ID NO: 1580) | (SEQ ID NO: 1815) |
| AB- | EVQLEQSGAEVKKPGESLKISCKGSGYTFTSYWIVWVRQM | SYVLTQPPSVSVAPGKTARITCGGNNIGRKSVHWYQQ |
| 009739 | PGKGLEWLGIIYPGDSDTRYSLAFQGQVTISADKSISTAY | KPGQTPVLVVYDDTDRPSRIPERFSGSNSGNTATLTIS |
| | LQWSSLKPSDTAFYYCARLSAQRGNSGPAVYWGQGTLVTV | RVEAGDEADYYCQVWDSSSDHVVFGGGTRLTVP |
| | SS (SEQ ID NO: 1581) | (SEQ ID NO: 1816) |
| AB- | EVLLLESGGDLVQPGGSLRLSCAASGFTFSSYGMNWVRQA | QLVLTQSPSASASLGASVRLTCTLSSGHSSYPIAWHQQ |
| 009740 | PGKGLEWVSSISGSGGSPYYADSVKGRFTISRDNSKNTLY | QPDKGPRYLLKLNSDGSHSKGDGIPDRFSASSSGTERY |
| | LQMKSLRAEDTAIYYCAKSEETMTTVTTFFDYWGQGTLVT | LTISSLQSEDEADYYCQTWGTATPWVFGGGTKLTVL |
| | VSS (SEQ ID NO: 1582) | (SEQ ID NO: 1817) |
| AB- | EVQLLESGGGLVQPGGSLRLSCAASGFTFSSYAMSWVRQA | DIQMTQSPSSLSASVGDRVTITCRTSQSIATYLNWYHQ |
| 009741 | PGKGLECVALINGGGGRTYYTDSVKGRFTISRDNSKNTLY | KPGKPPNLLIFAASSLHSGVPSRFSGSGSGTDFTLTIS |
| | LQMNSLRAEDTAVYYCERSVGYWGQGTLVTVSS | SLQPEDFATYYCQQTYSAPYTFGQGTKLAIK |
| | (SEQ ID NO: 1583) | (SEQ ID NO: 1818) |
| AB- | EVQLVESGGGLEQPGRSLRLSCAASGITFEDYALHWVRQA | DIQMTQSPSSVSASLGDRVTITCRASQGISNLLAWYQQ |
| 009742 | PGKGLEWVSGISWNGANIGYADSVKGRFTISRDNAQKSLY | KPGKAPKLLIYAASRLQSGVPSRFSGSGSGTDFTLTIS |
| | LQMSGLRTEDTALYYCAKSTVTTLRRTYFDSWGHGTLVIV | SLQPEDFATYYCQQANTFPPALTFGGGTKVEIK |
| | SS (SEQ ID NO: 1584) | (SEQ ID NO: 1819) |
| AB- | QVYLVQSGAEVKKPGASVKVSCKVSGNTLSELYIYWVRQA | QAVVTQEPSLTVSPGGTVTLTCGSSTGPVTSGRYPYWL |
| 009743 | PGKGLEWMGGFDPEDGETIYAQNFQGRVTITEDTSTDTVY | QQKPGQAPRTLIYDTNTKYSWTPARFSGSLLGGKAAL |
| | MELSSLRSEDTATYYCATHDFGDSEGEYWGQGTQVTVSS | TLSGAQPEDEADYYCLLSYSGARVFGGGTKLTVL |
| | (SEQ ID NO: 1585) | (SEQ ID NO: 1820) |
| AB- | PVQLVQSGAEVKKPGASVKVSCQTSGYTFTNYAVHWVRQ | QSALTQPRSVSGSPGQPVTISCTGSSSDVGGYNYVSWY |
| 009744 | APGQGLEWMGWINAGNGNTKYSQKFQGRVTITRDTSASTA | QQHPGKAPKLIIYDVGKRPSRVPDRFSGSKSGNTASLT |
| | YMELSSLRSEDTAVYYCAKDQWADYHTTGDFEYWGQGTL | ISGLQAEDEADYYCCSYAGTHTYILFGGGTKVTVL |
| | VTVSS (SEQ ID NO: 1586) | (SEQ ID NO: 1821) |
| AB- | EVQLVESGGGLVPPGRSLRLSCRASGFTFGDYAMNWFRQA | DVVMTQSPLSLPVTLGQPASISCRSSQSLVYSDGNTYL |
| 009745 | PGKGLEWVGFIRSKVYGETTEYAASVKGRFTISRDDSRSI | NWFHQRPGQSPRRLIYRVSNWDSGVPDRFSGSGSGTD |
| | AYLQMDSLKTEDTAVYFCTRDGRLLWFEESDWGDAFGIWG | FTLKISRVEAEDVGVYYCMQGTHWPYTFGQGTKLEIK |
| | QGTMVTVSS (SEQ ID NO: 1587) | (SEQ ID NO: 1822) |
| AB- | QLQLQESGPGLKKPSETLSLTCTVSGASLISNSYYWGWIR | QSVLTQPPSVSGAPGQRVTISCTGSSSNIGAGYDVHWY |
| 009746 | QPPGKGLEWIGSIFYSGTTHYNPSLKSRVTISVDTSKNQF | QQLPGTAPKLLIYDNTNRPSGVPDRFSGSKSGTSASLA |
| | SLRLTSVTAADTAVYYCARLTVDRRLQGYYYYYYMDVWGK | ITGLQAEDEADYYCQSYDNSLSGSLFGGGTKLTVL |
| | GTTVTVSS (SEQ ID NO: 1588) | (SEQ ID NO: 1823) |
| AB- | QVQLVESGGGVVQPGGSLRLSCAASGFTFSNYGMHWVRQ | DIVMTQSPDSLAVSLGERATINCKSSQSVLYSSNNKNY |
| 009747 | APGKGLEWVAFIRYDGSNEYYADSVKGRFTISRDNSKNTL | LTWYQQKPGQPPKLLIYWASTRESGVPDRFSGSGSGT |
| | YLHMNSLRPEDTAVYYCAKQGLLSNYYYGMDVWGQGTTV | DFTLTISSLQAEDVAVYHCQQYYSSVTFGQGTRLEIK |
| | TVSS (SEQ ID NO: 1589) | (SEQ ID NO: 1824) |
| AB- | QVQLAESGGGVVQPGGSLRLSCAASGFTFSSHGMHWVRQA | DIQMTQSPSSLSASVGDRVTITCRASQGISNYLAWYQQ |
| 009748 | PGKGLEWVAFIRYDGSNKYYADSVKGRFTIFRDNSKNTLY | KPGKVPKLLIYAASTLQSGVPSRFSGSGSGTDFTLTIS |
| | LQMNSLRAEDTAVYYCAKDNYYDILTGYYRKYYYFGMDV | SLQPEDVATYYCQKYNSAPFTFGPGTKVDIK |
| | WGQGTTVTVSS (SEQ ID NO: 1590) | (SEQ ID NO: 1825) |
| AB- | QVQLQESGPGLVKPSETLSLTCTVSGGSISSYYWSWIRQP | SYELTQPPSVSVSPGQTARITCSGDALPKKYASWYQQK |
| 009749 | PGKGLEWIGYIHYSGSTIYNPSLKSRVTISVDTSKSQFSL | SGQAPVLVIYEDTKRPSGIPERFSGSSSGTMATLTISG |
| | KLSSVTAADTAVYYCARTAGSDDSGYLPFDYWGQGTLVTV | AQVEDEADYYCYSTDSSGNHRVFGGGTKLTVL |
| | SS (SEQ ID NO: 1591) | (SEQ ID NO: 1826) |
| AB- | QLQLQESGPGLVKPSETLSLTCTVSGGSISSSSYYWGWIR | AIQLTQSPSSLSASVGDRVTITCRASQGISSYLAWYQQ |
| 009750 | QPPGKGLEWIGSIYYSGSTYYNPSLKSRVTISVDTSKNQF | KPGKAPKLLIYAASTLQSGVPSRFSGSGSGTDFTLTIS |
| | SLKLSSVTAADTAVYYCSRSPFSISIFGVVIRYGMDVWGQ | SLQPEDFATYYCQQLNSYPRTFGQGTKLEIK |
| | TGTVTVSS (SEQ ID NO: 1592) | (SEQ ID NO: 1827) |
| AB- | QVQLQESGPGLVKPSQTLSLTCTVSGGSISSGDYYWSWIR | EIVLTQSPGTLSLSPGERATLSCRASQSVSSSYLAWYQ |
| 009751 | QPPGKGLEWIGYIYYSGSTYYNPSLKSRVTISVDTSKNQF | QKPGQAPRLLIYGASSRATGIPDRFSGSGSGTDFTLTI |
| | SLKLSSVTAADTAVYYCARAITKITIFGVVIENFDYWGQG | SRLEPEDFAVYYCQQYGSSPLTFGGGTKVEIK |
| | TLVTVSS (SEQ ID NO: 1593) | (SEQ ID NO: 1828) |
| AB- | QVQLVQSGAEVKKPGASVKVSCKASGYTFTSYAMHWVRQ | SSELTQDPAVSVALGQTVRITCQGDSLRSYYASWYQQ |
| 009752 | APGQRLEWMGWINAGNGNTKYSQKFQGRVTITRDTSASTA | KPGQAPVLVIYGKNNRPSGIPDRFSGASSGNTASLTIT |
| | YMELSSLRSEDTAVYYCAREVFEAAAGMLLPYYYYYMDV | GAQAEDEADYYCNSRDSSGNHLVFGGGTKLTVL |
| | WGKGTTVTVSS (SEQ ID NO: 1594) | (SEQ ID NO: 1829) |
| AB- | QVQLQESGPGLVKPSETLSLTCTVSGGSISSHQWNWIRQP | DIQMTQSPSSLSASVGDRVTITCRASQSISSYLNWYQQ |
| 009753 | PGKGLEWIAYIYYSGSTNYNPSLKSRVTISVDTSKNQFSL | KPGKAPKLLIYAASSLQSGVPSRFSGSGSGADFTLTIS |
| | KLSSVTAADTAVYYCARQRREWLGSYYYYGMDVWGQGTTV | SLQPEDFATYYCQQSYSTPLTFGGGTKVEIK |
| | TVSS (SEQ ID NO: 1595) | (SEQ ID NO: 1830) |
| AB- | QLQLQESGPGLVKPSETLSLTCTVSGGSISSSSYYWGWIR | SSELTQDPAVSVALGQTVRITCQGDSLRSYYASWYQQ |
| 009754 | QPPGRGLEWIGIIYYSGSTYYNPSLKSRVTISVDTSKNQF | KPGQAPLLVIYGKNNRPSGIPDRFSASSSGNTASLTIT |
| | SLKLTSVTAADTAVYYCARVYAGFLEWLSYFDYWGQGTLV | GAQAEHEADYYCNSRDSSGNHWVFGGGTKLTVL |
| | TVSS (SEQ ID NO: 1596) | (SEQ ID NO: 1831) |
| AB- | QVQLQESGPGLVKPSQTLSLTCTVSGDSISSGAYYWSWIR | EIVLTQSPGTLSLSPGERATLSCRASQSVSSSYLAWYQ |
| 009755 | QHPGKGLEWIGYIYYSGSTYYNPSLKSRVTISVDTSKNQF | QKPGQAPRLLIYGASSRATGIPDRFSGSGSGTDFTLTI |
| | SLKLSSVTAADTAVYYCARARRITIFGVVGDFGVWGQGTL | SRLEPEDFAVYYCQQYGSSPLTFGGGTKVEIK |
| | VTVSS (SEQ ID NO: 1597) | (SEQ ID NO: 1832) |
| AB- | EVQLLESGGGLVQPGGSLRLSCAASGFTFSSFAMSWVRQA | SYELTQPPSVSVSPGQTARITCSGDALPKQYAYWYQQ |
| 009756 | PGKGLEWVSAISGSGGSTYYADSVKGRFTISRDNSKNTLY | KPGQAPILMIYKDTERPSGIPERFSGSSSGTTVTLTIS |
| | LQMNSLRAEDTAVYYCAKEERVYDILTGYDYWGQGTLVTV | GVQAEDEADYYCQSADSSGSSVVFGGGTKLTVL |
| | SS (SEQ ID NO: 1598) | (SEQ ID NO: 1833) |
| AB- | QLQLQESGPGLVKPSETLSLTCTVSGGSISSSSYYWGWIR | EIVLTQSPATLSLSPGERATLSCRASQSVSSYLAWYQQ |
| 009757 | QPPGKGLEWIGSIYYSGSTYYNPSLKSRVTISVDTSKNQF | KPGQAPRLLIYDASNRATGIPARFSGSGSGTDFTLTIS |
| | SLKLSSVTAADTAVYYCARLKNWNTIFGVVIMAPYYMDVW | SLEPEDFAVYYCQQRSKGITFGQGTRLEIK |
| | GKGTTVTVSS (SEQ ID NO: 1599) | (SEQ ID NO: 1834) |
| AB- | QVQLVQSGAEVKKPGASVKVSCKVSGYTLTELSMHWVRQ | SYVLTQPPSVSVAPGKTARITCGGNNIGSKSVHWYQQ |
| 009758 | APGKGLEWMGGFDPEDGETIYAQKFQARVTMTEDTSTDTA | KPGQAPVLVVYDDSDRPSGIPERFSGSNSGNTATLTIS |
| | YMELSSLRSEDTAVYFCATGYYGSRFDPWGQGTLVTVSS | RVEAGDEADYYCQVWDSSTDHPGVVFGGGTKLTVL |
| | (SEQ ID NO: 1600) | (SEQ ID NO: 1835) |
| AB- | QVQLVQSGAEVKKPGSSVKVSCKASGGTFSSYAISWVRQA | EIVMTQSPATLSVSPGERATLSCRASQSVSSKLAWYQQ |
| 009759 | PGQGLEWMGGIIPIFGTANYAQKFQGRVTITADESTSTAY | KPGQAPRLLIYGASTRATGIPARFSGSGSGTEFTLTIS |
| | MELSSLRSEDTAVYYCARALVQGVYYYYMDVWGKGTTVTV | SLQSEDFAVYYCQQYNNWPPYTVGQGTKLEIK |
| | SS (SEQ ID NO: 1601) | (SEQ ID NO: 1836) |
| AB- | EVQLVQSGAEVKKPGESLKISCKGSGYSFTSYWIGWVRQM | DIQMTQSPSTLSASVGDRVTITCRASQSISSWLAWYQQ |
| 009760 | PGKGLEWMGIIYPGDSDTRYSPSFQGQVTISADKSISTAY | KPGKAPKLLIYDASSLESGVPSRFSGSGSGTEFTLTIS |
| | LQWSSLKASDTAMYYCARSRSSDYFDYWGQGTLVTVSS | SLQPDDFATYYCQQYNSYSRTFGQGTKVEIK |
| | (SEQ ID NO: 1602) | (SEQ ID NO: 1837) |
| AB- | EVQLVESGGGLVQPGGSLRLSCAASGFTFSSYAMSWVRQA | DIQMTQSPSTLSASVGDRVTITCRASQSISSWLAWYQQ |
| 009761 | PGKGLEWVSAISGSGGSTYYADSVKGRFTISRDNSKNTLY | KPGKAPKLLIYDASSLESGVPSRFSGSGSGTEFTLTIS |
| | LQMNSLRAEDTAVYYCAKGPRSAPDYMDVWGKGTTVTVSS | SLQPDDFATYYCQQYNSYSGTFGQGTKVEIK |
| | (SEQ ID NO: 1603) | (SEQ ID NO: 1838) |
| AB- | QVQLVESGGGLVKPGGSLRLSCAASGFTFSDYYMSWIRQA | DIQMTQSPSSLSASVGDRVTITCRASQSISSYLNWYQQ |
| 009762 | PGKGLEWVSYISRSGSTIYYVDSVKGRFTISRDNAKNSLY | KPGKAPKLLIYAASSLQSGVPSRFSGSGSGTDFTLTIS |
| | LQMNSLRAEDTAVYYCARDQRLWSTLGVYYYYYMDVWGKG | SLQPEDFATYYCQQSYSHPLTFGGGTKVEIK |
| | TTVTVSS (SEQ ID NO: 1604) | (SEQ ID NO: 1839) |
| AB- | QVQLQQWGAGLLKPSETLSLTCAVYGGSFSGYYWSWIRQP | DIQMTQSPSTLSASVGDRVTITCRASQSINNWLAWYQQ |
| 009763 | PGKGLEWIGEINHSGSTNYNPSLKSRVTISVDTSKNQFSL | KPGKAPQLLIYKASSLESGVPSRFSGSGSGTKFTLTIS |
| | KLSSVTAADTAVYYCARRAAPAWTWFGELSPFDYWGQGTL | SLQPDDFATYYCQQYNSYSQYTFGQGTKLEIK |
| | VTVSS (SEQ ID NO: 1605) | (SEQ ID NO: 1840) |
| AB- | QVQLQESGPGLVKPSETLSLTCTVSGGSISSHYWSWIRQP | QSALTQPPSASGSPGQSVTISCTGTSSDVGGYNYVSWY |
| 009764 | PGKGLEWIGYIYYSGSTNYNPSLKSRVTISVDTSKNQFSL | QQHPGKAPKLMIFDVSKRPSGVPDRFSGSKSGNTASLT |
| | KLSSVTAADTAVYYCARSARRWLQYGPDWYFDLWGRGTLV | VSGLQAEDEADYYCSSYAGSNNWVFGGGTKLTVL |
| | TVSS (SEQ ID NO: 1606) | (SEQ ID NO: 1841) |
| AB- | QVQLVESGGGLVKPGGSLRLSCAASGFTFSDYYMSWIRQA | EIVMTQSPATLSVSPGERATLSCRASQSVSSNLAWYQQ |
| 009765 | PGKGLEWVSYISSSGNTIYYADSVKGRFTISRDNAKNSLY | KPGQAPRLLIYGASTRATGFPARFSGSGSGTEFTLTIS |
| | LQMNSLRAEDTAVYYCARDPPPRITIFGVGTRLGFDYWGQ | GLQSEDFAVYYCQQYNNWPPWTFGQGTKVEIK |
| | GTLVTVSS (SEQ ID NO: 1607) | (SEQ ID NO: 1842) |
| AB- | QLQLQESGPGLVKPSETLSLTCTVSGGSISRSSYYWGWIR | DIQLTQSPSFLSASVGDRVTITCRASQGISSYLAWYQQ |
| 009766 | QPPGKGLEWIGSIYYSGSTYYNPSLKSRVTISVDTSKNQF | KPGKAPKLLIYAASTLQSGVPSRFSGSGSGTEFTLTIS |
| | SLKLSSVTAADTAVYYCARQLLGIWGSYRYIDYWGQGTLV | SLQPEDFATYYCQQLNSYPITFGQGTRLEIK |
| | TVSS (SEQ ID NO: 1608) | (SEQ ID NO: 1843) |
| AB- | EVQLVQSGAEVKKPGESLKISCKGSGYSFTSYWIGWVRQM | QSALTQPASVSGSPGQSITISCTGTSSDVGGYNYVSWY |
| 009767 | PGKGLEWMGIIYPGDSDTRYSPSFQGQVTISADKSISTAY | QQHPGKAPKLMIYDVSNRPSGVSNRFSGSKSGNTASLT |
| | LQWSSLKASDTAMYYCASGRLHLGELLDYWGQGTLVTVSS | ISGLQAEDEADYYCSSYTSSSTLVVFGGGTKLTVL |
| | (SEQ ID NO: 1609) | (SEQ ID NO: 1844) |
| AB- | QLQLQESGPGLVKPSETLSLTCTVSGGSISSSSYYWGWIR | QSVLTQPPSVSGAPGQRVTISCTGSSSNIGAGYDVHWY |
| 009768 | QPPGKGLEWIGSIYYSGSTYYNPSLKSRVTISVDTSKNQF | QHLPGTAPKLLIYGNSNRPSGVPDRFSGSKSGTSASLA |
| | SLKLSSVTAADTAVYHCARQPRRITIFGVVIMPTNNWFDP | ITGLQAEDEADYYCQSYDSSLSDVVFGGGTKLTVL |
| | WGQGTLVTVSS (SEQ ID NO: 1610) | (SEQ ID NO: 1845) |
| AB- | EVQLVESGGGLVQPGGSLRLSCAASGFTFSSYWMSWVRQA | SYELTQPPSVSVSPGQTARITCSGDALPKQYAYWYQQ |
| 009769 | PGKGLEWVANIKQDGSEKYYVDSVKGRFTISRDNAKNSLY | KPGQAPVLVIYKDSERPSGIPERFSGSSSGTTVTLTIS |
| | LQMNSLRAEDTAVYYCARSPEVLWFGDPVLDNWFDPWGQ | GVQAEDEADYYCQSADSSGTYPVVFGGGTKLTVL |
| | GTLVTVSS (SEQ ID NO: 1611) | (SEQ ID NO: 1846) |
| AB- | EVQLVESGGGLVKPGGSLRLSCAASGFTFSSYSMNWVRQA | DIQMTQSPSSLSASVGDRVTITCRASQSISSYLNWYQQ |
| 009770 | PGKGLEWVSSISSSSSYIYYADSVKGRFTISRDNAKNSLY | KPGKAPKLLIYAASSLQSGVPSRFSGSGSGTDFTLTIS |
| | LQMNSLRAEDTAVYYCARDPYYDILTGYYLYWGQGTLVTV | SLQPEDFATYYCQQSYSTPLITFGQGTRLEIK |
| | SS (SEQ ID NO: 1612) | (SEQ ID NO: 1847) |
| AB- | EVQLVESGGGLVQPGGSLRLSCAASGFTFSSYWMHWVRQA | DIQMTQSPSTLSASVGDRVTITCRASQSISRWLAWYQQ |
| 009771 | PGKGLVWVSRINSDGSSTSYADSVKGRFTISRDNAKNTLY | KPGKAPKLLIYKASSLESGVPSRFSGSGSGTEFTLTIS |
| | LQMNSLRAEDTAVYYCARDGRNIAVAGLDYWGQGTLVTVS | SLQPDDFATYYCQQYNSYQGTFGQGTKVEIK |
| | S (SEQ ID NO: 1613) | (SEQ ID NO: 1848) |
| AB- | QLQLQESGPGLVKPSETLSLTCTVSGGSISSSSYYWGWIR | QSVLTQPPSVSGAPGQRVTISCTGSSSNIGAGYDVHWY |
| 009772 | QPPGKGLEWIGSIYYSGSTYYNPSLKSRVTISVDTSKNQF | QQLPGTAPKLLIYGNSNRPSGVPDRFSGSKSGTSASLA |
| | SLKLSSVTAADTAVYYCARHLQPSYGGNAFDIWGQGTMVT | ITGLQAEDEADYYCQSYDSSLSGYVFGTGTKVTVL |
| | VSS (SEQ ID NO: 1614) | (SEQ ID NO: 1849) |
| AB- | QVQLVQSGAEVKKPGASVKVSCKASGYTFTGYYMHWVRQ | DIQMTQSPSSLSASVGDRVTITCRASQSISSYLNWYQQ |
| 009773 | APGQGLEWMGRINPNSGGTNYAQKFQGRVTMTRDTSISTA | KPGKAPKLLIYAASSLQSGVPSRFSGSGSGTDFTLTIS |
| | YMELSRLRSDDTA VYYCARDGCSGGSCYSWWFDPWGQGT | SLQPEDFATYYCQQSYSTPLTFGGGTKVEIK |
| | LVTVSS (SEQ ID NO: 1615) | (SEQ ID NO: 1850) |
| AB- | QLQLQESGPGLVKPSETLSLTCTVSGGSISSSSYYWGWIR | DIVMTQSPDSLAVSLGERATINCKSSQSVLYSSNNKNY |
| 009774 | QPPGKGLEWIGSIYYSGSTYYNPSLKSRVTISVDTSKNQF | LAWYQQKPGQPPKLLIYWASTRESGVPDRFSGSGSGT |
| | SLKLSSVTAADTAVYYCARQKTDIVVVVATEVAFDYWGQG | DFTLTISSLQAEDVAVYYCQQYYSTPLTFGQGTKLEIK |
| | TLVTVSS (SEQ ID NO: 1616) | (SEQ ID NO: 1851) |
| AB- | QLQLQESGPGLVKPSETLSLTCTVSGGSISSSSYYWGWIR | EIVLTQSPGTLSLSPGERATLSCRASQSVSSSYLAWYQ |
| 009775 | QPPGKGLEWIGSIYYSGSTYYNPSLKSRVTISVDTSKNQF | QKPGQAPRLLIYGASSRATGIPDRFSGSGSGTDFTLTI |
| | SLKLSSVTAADTAVYYCARQVRSGIVVVTPYYFDYWGQGT | SRLEPEDFAVYYCQQYGSSPRTFGQGTKVEIK |
| | LVTVSS (SEQ ID NO: 1617) | (SEQ ID NO: 1852) |
| AB- | QVQLQESGPGLVKPSQTLSLTCTVSGGSISSGGYYWSWIR | SYELTQPPSVSVSPGQTASITCSGDKLGDKYACWYQQ |
| 009776 | QHPGKGLEWIGYIYYSGSTYYNPSLKSRVTISVDTSKNQF | KPGQSPVLVIYQDSKRPSGIPERFSGSNSGNTATLTIS |
| | SLKLSSVTAADTAVYYCARDQYDSSGYAFGAFDYWGQGTL | GTQAMDEADYYCQAWDSSTAWVFGGGTKLTVL |
| | VTVSS (SEQ ID NO: 1618) | (SEQ ID NO: 1853) |
| AB- | EVQLVESGGGLVKPGGSLRLSCAASGFTFSSYSMNWVRQA | SSELTQDPAVSVALGQTVRITCQGDSLRSYYASWYQQ |
| 009777 | PGKGLEWVSSISSSSSYIYYADSVKGRFTISRDNAKNSLY | KPGQAPVLVIYGKNNRPSGIPDRFSGSSSGNTASLTIT |
| | LQMNSLRAEDTAVYYCARDESVAHYYGSGSVDVWGQGTTV | GAQAEDEADYYCNSRDSSGNRWVFGGGTKLTVL |
| | TVSS (SEQ ID NO: 1619) | (SEQ ID NO: 1854) |
| AB- | QLQLQESGPGLVKPSETLSLTCTVSGGSISSSSYYWGWIR | DIQMTQSPSTLSASVGDRVTITCRASQSISSWLAWYQQ |
| 009778 | QPPGKGLEWIGSIYYSGSTYYNPSLKSRVTISVDTSKNQF | KPGKAPKLLIYKASSLESGVPSRFSGSGSGTEFTLTIS |
| | SLKLSSVTAADTAVYYCARQFRRWLQLGPSYFDYWGQGTL | SLQPDDFATYYCQQYNSYSRAWTFGQGTKVEIK |
| | VTVSS (SEQ ID NO: 1620) | (SEQ ID NO: 1855) |
| AB- | EVQLVESGGGLVKPGGSLRLSCAASGFTFSNAWMSWVRQA | DIQMTQSPSSLSASVGDRVTITCRASQGIKYYLAWFQQ |
| 009779 | PGKGLEWVGRIKTKSDGGTTDYAAPVKGRFIISRDDSKNT | KPGKAPKSLIYAASSLLSGVPSKFSGSGSGTDFTLTIS |
| | LYLQINSLKVEDTAIYYCSRNPFLDYWGQGTLVTVSS | SLQPEDFATYYCQQYNSYPYTFGQGTKLEIK |
| | (SEQ ID NO: 1621) | (SEQ ID NO: 1856) |
| AB- | QVQLQESGPGLVKPSQTLSLTCTVSGGSISSGDYYWSWIR | DIQMTQSPSSLSASVGDRVTITCRASQSISSYLNWYQQ |
| 009780 | QPPGKGLEWIGYIYYSGSTYYNPSLKSRVTISVDTSKNQF | KPGKAPKLLIYAASSLQSGVPSRFSGSGSGTDFTLTIS |
| | SLKLSSVTAADTAVYYCARDRWGITIFGVVNRDGMDVWGQ | SLQPEDFATFYCQQSYSFPYTFGQGTKLEIK |
| | GTTVTVSS (SEQ ID NO: 1622) | (SEQ ID NO: 1857) |
| AB- | EVQLVESGGGLVKPGGSLRLSCAASGFTFSNAWMSWVRQA | DIQMTQSPSTLSASVGDRVTITCRASQSISSWLAWYQQ |
| 009781 | PGKGLEWVGRIKSKTDGGTTDYAAPVKGRFTISRDDSKNT | KPGKAPKLLIYDASSLESGVPSRFSGSGSGTEFTLTIS |
| | LYLQMNSLKTEDTAVYYCTTLGHQYYDSSGYDYYYGMDV | SLQPDDFATYYCQQYNSYTWTFGQGTKVEIK |
| | WGQGTTVTVS (SEQ ID NO: 1623) | (SEQ ID NO: 1858) |
| AB- | QVQLQESGPGLVKPSETLSLTCTVSGGSISSYYWSWIRQP | SYELTQPPSVSVSPGQTARITCSGDALPKKYAYWYQQ |
| 009782 | AGKGLEWIGRIYTSGSTNYNPSLKSRVTMSVDTSKNQFSL | KSGQAPVLVIYEDSKRPSGIPERFSGSSSGTMATLTIS |
| | KLSSVTAADTAVYYCARGRLFYDSSGYYFDYWGQGTLVTV | GAQVEDEADYYCYSTDSSGNHYVFGTGTKVTVL |
| | SS (SEQ ID NO: 1624) | (SEQ ID NO: 1859) |
| AB- | QVQLQESGPGLVKPSETLSLTCTVSAGSISSHYWSWIRQP | EIVLTQSPGTLSLSPGERATLSCRASQSVSSSYLAWYQ |
| 009783 | PGKGLEWIGYIYYSGSTNYNPSLRSRVTISVDTSKNQFSL | QKPGQAPRLLIYGASSRATGIPDRFSGSGSGTDFTLTI |
| | KLSSVTAADTAVYYCARTLRQWLARGYYYFDYWGQGTLVT | SRLEPEDFAVYYCQQYGSSPYTFGQGTKLEIK |
| | VSS (SEQ ID NO: 1625) | (SEQ ID NO: 1860) |
| AB- | QLQLQESGPGLVKPSETLSLTCTVSGGSISSSSYYWGWIR | QSALTQPASVSGSPGQSITISCTGTSSDVGGYNYVSWY |
| 009784 | QPPGKGLEWIGSIYYSGSTYYNPSLKSRVTISVDTSKNQF | QQHPGKAPQLMIYDVINRPSGVSNRFSGSKSGNTASLT |
| | SLKLSSVTAADTAVYYCVRHRGWIQLWFFDYWGQGTLVTV | ISGLQAEDEADYYCSSYTSSSTVVFGGGTKLTVL |
| | SS (SEQ ID NO: 1626) | (SEQ ID NO: 1861) |
| AB- | QVQLQESGPGLVKPSETLSLTCTVSGGSISSYYWSWIRQP | EIVLTQSPGTLSLSPGERATLSCRASQSVSSSYLAWYQ |
| 009785 | PGKGLEWIGYIYYSGSTNYNPSLKSRVTISVDTSKNQFSL | QKPGQAPRLLIYGASSRATGIPDRFSGSGSGTDFTLTI |
| | KLSSVTAADTAVYYCARLRAHTIFGVPIADAFDIWGQGTM | SRLEPEDFAVYYCQQYGSSPLTFGGGTKVEIK |
| | VTVSS (SEQ ID NO: 1627) | (SEQ ID NO: 1862) |
| AB- | QVQLQQWGAGLLKPSETLSLTCAVYGGSFSGYYWSWIRQP | SSELTQDPAVSVALGQTVRITCQGDSLRSYYASWYQQ |
| 009786 | PGKGLEWIGEINHSGSTNYNPSLKSRVTISVDTSKNQFSL | KPGQAPVVVIYGKNNRPSGIPDRFSGSSSGNTASLTIT |
| | KLSSVTAADTAVYYCARHLSLITVIVVVTYQLDAFDIWGQ | GAQAEDEADYYCNSRDSSGNHRVFGGGTKLTVL |
| | GTMVTVSS (SEQ ID NO: 1628) | (SEQ ID NO: 1863) |
| AB- | QLQLQESGPGLVKPSETLSLTCTVSGGSISSSSYYWGWIR | QSALTQPASVSGSPGQSITISCTGTSSDVGSYNLVSWY |
| 009787 | QPPGKGLEWIGSIYYSGSTYYNPSLKSRVTISVDTSKNQF | QQHPGKAPKLMIYEGSKRPSGVSNRFSGSKSGNTASLT |
| | SLKLSSVTAADTAVYYCARHYSSITIFGVVSGRYMDVWGK | ISGLQAEDEADYYCCSYAGSAVFGGGTKLTVL |
| | GTTVTVSS (SEQ ID NO: 1629) | (SEQ ID NO: 1864) |
| AB- | QVQLQESGPGLVKPSETLSLTCTVSGGSISSHYWSWIRQP | EIVLTQSPGTLSLSPGERATLSCRASQSVSSSYLAWYQ |
| 009788 | PGKGLEWIGYIYYSGSTNYNPSLKSRVTISVDTSKNQFSL | QKPGQAPRLLIYGASSRATGIPDRFSGSGSGTDFTLTI |
| | KLSSVTAADTAVYYCARDLRGWLQSPNWYFDLWGRGTLVT | SRLEPEDFAVYYCQQYGSSPAYTFGQGTKLEIK |
| | VSS (SEQ ID NO: 1630) | (SEQ ID NO: 1865) |
| AB- | EVQLVESGGGLVQPGGSLRLSCAASGFTFSSYAMSWVRQA | SYELTQPPSVSVSPGQTASITCSGDKLGDKYACWYQQ |
| 009789 | PGKGLEWVSAISGSGGSTYYADSVKGRFTISRDNSKNTLY | KPGQSPVLVIYQDSKRPSGIPERFSGSNSGNTATLTIS |
| | LQMNSLRAEDTAVYYCAKESGSGYYNWGQGTLVTVSS | GTQAMDEADYYCQAWDSSSVVFGGGTKLTVL |
| | (SEQ ID NO: 1631) | (SEQ ID NO: 1866) |
| AB- | EVQLLESGGGLVQPGGSLRLSCAASGFTFSSYAMSWVRQA | SYELTQPPSVSVSPGQTASITCSGDKLGDKYACWYQQ |
| 009790 | PGKGLEWVSAISGSGGSTYYADSVKGRFTISRDNSKNTLY | KPGQSPVLVIYQDSKRPSGIPERFSGSNSGNTATLTIS |
| | LQMNSLRAEDTAVYYCAKTSGTGTLAYWGQGTLVTVSS | GTQAMDEADYYCQAWDSSTLVFGGGTKLTVL |
| | (SEQ ID NO: 1632) | (SEQ ID NO: 1867) |
| AB- | QLQLQESGPGLVKPSETLSLTCTVSGGSISSSSYYWGWIR | SYELTQPPSVSVSPGQTASITCSGDKLGDKYACWYQQ |
| 009791 | QPPGKGLEWIGSIYYSGSTYYNPSLKSRVTISVDTSKNQF | KPGQSPVLVIYQDSKRPSGIPERFSGSNSGNTATLTIS |
| | SLKLSSVTAADTAVYYCAREPRRVKQWLVVPYYYMDVWGK | GTQAMDEADYYCQAWDSSIVVFGGGTKLTVL |
| | GTTVTVSS (SEQ ID NO: 1633) | (SEQ ID NO: 1868) |
| AB- | QVQLQESGPGLVKPSETLSLTCTVSGGSISSYYWSWIRQP | DIQMTQSPSTLSASVGDRVTITCRASQSISSWLAWYQQ |
| 009792 | PGKGLEWIGYIYYSGSTNYNPSLKSRVTISVDTSKNQFSL | KPGKAPKLLIYKASSLESGVPSRFSGSGSGTEFTLTIS |
| | KLSSVTAADTAVYYCARTLHSTIFGVVIMPSSFDYWGQGT | SLQPDDFATYYCQQYNSYATFGQGTKLEIK |
| | LVTVSS (SEQ ID NO: 1634) | (SEQ ID NO: 1869) |
| AB- | QVQLVQSGAEVKKPGASVKVSCKASGYTFTSYGISWVRQA | EIVLTQSPGTLSLSPGERATLSCRASQSVSSSYLAWYQ |
| 009793 | PGQGLEWMGWISAYNGNTNYAQKLQGRVTMTTDTSTSTA | QKPGQAPRLLIYGASSRATGIPDRFSGSGSGTDFTLTI |
| | YMELRSLRSDDTA VYYCARLHRMITFGGVIAQLDVWGKG | SRLEPEDFAVYYCQQYGSSPWTFGQGTKVEIK |
| | TTVTVSS (SEQ ID NO: 1635) | (SEQ ID NO: 1870) |
| AB- | QVQLVQSGAEVKKPGASVKVSCKVSGYTLTELSMHWVRQ | QSVLTQPPSVSEAPGQRVTISCTGSSSNIGAGYDVHWY |
| 009794 | APGKGLEWMGGFDPEDGETIYAQKFQGRVTMTEDTSTDTA | QQLPGTAPKLLIYGNSNRPSGVPDRFSGSKSGTSASLA |
| | YMELSSLRSEDTAVYYCATAGEQWLDRYYFDYWGQGTLV | ITGLQAEDEADYYCQSYDSSLSARYVFGTGTKVTVL |
| | TVSS (SEQ ID NO: 1636) | (SEQ ID NO: 1871) |
| AB- | QVQLVQSGAEVKKPGASVKVSCKASGYTFTSYDINWVRQA | SYELTQPPSVSVSPGQTASITCSGDKLGDKYACWYQQ |
| 009795 | TGQGLEWMGWMNPNSGNTGYAQKFQGRVTMTRNTSISTA | KPGQSPVLVIYQDSKRPSGIPERFSGSNSGNTATLTIS |
| | YMELSSLRSEDTAVYYCARARGYQLLFNYYYYMDVWGKG | GTQAMDEADYYCQAWDSSTAVFGGGTKLTVL |
| | TTVTVSS (SEQ ID NO: 1637) | (SEQ ID NO: 1872) |
| AB- | QLQLQESGPGLVKPSETLSLTCTVSGGSISSSSYYWGWIR | SSELTQDPAVSVALGQTVRITCQGDSLRSYYASWYQQ |
| 009796 | QPPGKGLEWIGSIYYSGSTYYNPSLKSRVTISVDTSKNQF | KPGQAPVLVIYGKNNRPSGIPDRFSGSSSGNTASLTIT |
| | SLKLSSVTAADTAVYYCARHKGQWLVRANWFDPWGQGTLV | GAQAEDEADYYCNSRDSSGNHLFGGGTKLTVL |
| | TVSS (SEQ ID NO: 1638) | (SEQ ID NO: 1873) |
| AB- | QLQLQESGPGLVKPSETLSLTCTVSGGSISSSSYYWGWIR | EIVLTQSPGTLSLSPGERATLSCRASQSVSSSYLAWYQ |
| 009797 | QPPGKGLEWIGSIYYSGSTYYNPSLKSRVTISVDTSKNQF | QKPGQAPRLLIYGASSRATGIPDRFSGSGSGTDFTLTI |
| | SLKLSSVTAADTAVYYCARHLRGGVIVATIYGVDYWGQGT | SRLEPEDFAVYYCQQYGSSQTFGQGTKVEIK |
| | LVTVSS (SEQ ID NO: 1639) | (SEQ ID NO: 1874) |
| AB- | QVQLVQSGAEVKKPGASVKVSCKASGYTFTSYYMHWVRQ | QSALTQPASVSGSPGQSITISCTGTSSDVGSYNLVSWY |
| 009798 | APGQGLEWMGIINPSGGSTSYAQKFQGRVTMTRDTSTSTV | QQHPGKAPKLMIYEGSKRPSGVSNRFSGSKSGNTASLT |
| | YMELSSLRSEDTAVYYCAREVPTFTIFWPLGRGGGWFDPW | ISGLQAEDEADYYCCSYAGSVVFGGGTKLTVL |
| | GQGTLVTVSS (SEQ ID NO: 1640) | (SEQ ID NO: 1875) |
| AB- | QVQLVQSGAEVKKPGASVKVSCKASGYTFTSYDINWVRQA | SYELTQPPSVSVSPGQTASITCSGDKLGDKYACWYQQ |
| 009799 | TGQGLEWMGWMNPNSGNTGYAQKFQGRVTMTRNTSISTA | KPGQSPVLVIYQDSKRPSGIPERFSGSNSGNTATLTIS |
| | YMELSSLRSEDTAVYYCARGRLRITIFNRVYYFDYWGQGT | GTQAMDEADYYCQAWDSSTAWVFGGGTKLTVL |
| | VLTVSS (SEQ ID NO: 1641) | (SEQ ID NO: 1876) |
| AB- | EVQLVESGGGLVKPGGSLRLSCAASGFTFSSYSMNWVRQA | QSALTQPPSASGSPGQSVTISCTGTSSDVGGYNYVSWY |
| 009800 | PGKGLEWVSSISSSSSYIYYADSVKGRFTISRDNAKNSLY | QQHPGKAPKLMIYEVSKRPSGVPDRFSGSKSGNTASLT |
| | LQMNSLRAEDTAVYYCARGHFDWLLYETYYFDYWGQGTLV | VSGLQAEDEADYYCSSYAGSNNVVFGGGTKLTVL |
| | TVSS (SEQ ID NO: 1642) | (SEQ ID NO: 1877) |
| AB- | EVQLVESGGGLVQPGGSLRLSCAASGFTFSSYWMSWVRQA | SYELTQPPSVSVSPGQTASITCSGDKLGDKYACWYQQ |
| 009801 | PGKGLEWVANIKQDGSEKYYVDSVKGRFTISRDNAKNSLY | KPGQSPVLVIYQDSKRPSGIPERFSGSNSGNTATLTIS |
| | LQMNSLRAEDTAVYYCARDTVRREQWLVLDYYYMDVWG | QGTAMDEADYYCQAWDSSIHVVFGGGTKLTVL |
| | KGTTVTVSS (SEQ ID NO: 1643) | (SEQ ID NO: 1878) |
| AB- | QLQLQESGPGLVKPSETLSLTCTVSGGSISSSSYYWGWIR | QSVLTQPPSVSGAPGQRVTISCTGSSSNIGAGYDVHWY |
| 009802 | QPPGKGLEWIGSIYYSGSTYYNPSLKSRVTISVDTSKNQF | QQLPGTAPKLLIYGNSNRPSGVPDRFSGSKSGTSASLA |
| | SLKLSSVTAADTAVYYCARQPRRITIFGVVITPTNNWFDP | ITGLQAEDEADYYCQSYDSSLSDVVFGGGTKLTVL |
| | WGQGTLVTVSS (SEQ ID NO: 1644) | (SEQ ID NO: 1879) |
| AB- | EVQLVESGGGLVQPGGSLRLSCAASGFTVSSNYMSWVRQA | EIVMTQSPATLSVSPGERATLSCRASQSVSSNLAWYQQ |
| 010019 | PGKGLEWVSVIYSGGSTYYADSVKGRFTISRDNSKNTLYL | KPGQAPRLLIYGASTRATGIPARFSGSGSGTEFTLTIS |
| | QMNSLRAEDTAVYYCARDYGDFYFDYWGQGTLVTVSS | SLQSEDFAVYYCQQYNNWPRTFGQGTKVEIK |
| | (SEQ ID NO: 1645) | (SEQ ID NO: 1880) |
| AB- | QVQLVESGGGVVQPGRSLRLSCAASGFTFSSYGMHWVRQA | DIVMTQSPDSLAVSLGERATINCKSSQSVLYSSNNKNY |
| 4497999 | PGKGLEWVAVISYDGSNKYYADSVKGRFTISRDNSKNTLY | LAWYQQKPGQPPKLLIYWASTRESGVPDRFSGSGSGT |
| 20 | LQMNSLRAEDTAVYYCAKDYGDYGAFDIWGQGTMVTVSS | DFTLTISSLQAEDVAVYYCQQYYSTPHFGPGTKVDIK |
| | (SEQ ID NO: 1929) | (SEQ ID NO: 1937) |
| AB- | QVQLVQSGAEVKKPGSSVKVSCKASGGTFSSYAISWVRQA | EIVLTQSPATLSLSPGERATLSCRASQSVSSYLAWYQQ |
| 4496014 | PGQGLEWMGGIIPIFGTANYAQKFQGRVTITADESTSTAY | KPGQAPRLLIYDASNRATGIPARFSGSGSGTDFTLTIS |
| 61 | MELSSLRSEDTAVYYCASVGGDYDLDYWGQGTLVTVSS | SLEPEDFAVYYCQQRSNWPPYTFGQGTKLEIK |
| | (SEQ ID NO: 1930) | (SEQ ID NO: 1938) |
| AB- | QVQLVQSGAEVKKPGSSVKVSCKASGGTFSSYAISWVRQA | EIVLTQSPATLSLSPGERATLSCRASQSVSSYLAWYQQ |
| 4496352 | PGQGLEWMGGIIPIFGTANYAQKFQGRVTITADESTSTAY | KPGQAPRLLIYDASNRATGIPARFSGSGSGTDFTLTIS |
| 24 | MELSSLRSEDTAVYYCASVGGDYDLDYWGQGTLVTVSS | SLEPEDFAVYYCQQRSNWPPYTFGQGTKLEIK |
| | (SEQ ID NO: 1931) | (SEQ ID NO: 1939) |
| AB- | QVQLVQSGAEVKKPGSSVKVSCKASGGTFSSYAISWVRQA | EIVLTQSPATLSLSPGERATLSCRASQSVSSYLAWYQQ |
| 4497472 | PGQGLEWMGGIIPIFGTANYAQKFQGRVTITADESTSTAY | KPGQAPRLLIYDASNRATGIPARFSGSGSGTDFTLTIS |
| 65 | MELSSLRSEDTAVYYCASVGGDYDLDYWGQGTLVTVSS | SLEPEDFAVYYCQQRSNWPPYTFGQGTKLEIK |
| | (SEQ ID NO: 1932) | (SEQ ID NO: 1940) |
| AB- | QVQLVQSGAEVKKPGSSVKVSCKASGGTFSSYAISWVRQA | EIVLTQSPATLSLSPGERATLSCRASQSVSSYLAWYQQ |
| 4497813 | PGQGLEWMGGIIPIFGTANYAQKFQGRVTITADESTSTAY | KPGQAPRLLIYDASNRATGIPARFSGSGSGTDFTLTIS |
| 53 | MELSSLRSEDTAVYYCASVGGDYDLDYWGQGTLVTVSS | SLEPEDFAVYYCQQRSNWPPYTFGQGTKLEIK |
| | (SEQ ID NO: 1933) | (SEQ ID NO: 1941) |
| AB- | QVQLVQSGAEVKKPGSSVKVSCKASGGTFSSYAISWVRQA | EIVLTQSPATLSLSPGERATLSCRASQSVSSYLAWYQQ |
| 4498417 | PGQGLEWMGGIIPIFGTANYAQKFQGRVTITADESTSTAY | KPGQAPRLLIYDASNRATGIPARFSGSGSGTDFTLTIS |
| 46 | MELSSLRSEDTAVYYCASVGGDYDLDYWGQGTLVTVSS | SLEPEDFAVYYCQQRSNWPPYTFGQGTKLEIK |
| | (SEQ ID NO: 1934) | (SEQ ID NO: 1942) |
| AB- | QITLKESGPTLVKPTQTLTLTCTFSGFSLSTSGVGVGWIR | QSALTQPASVSGSPGQSITISCTGASSDVGAYNYVSWY |
| 4496458 | QPPGKALEWLALIYWDDDKRYSPSLKSRLTITKDTSKNQV | QQHPGKAPKLMIYDVSNRPSGVSNRFSGSKSGNTASLT |
| 91 | VLTMTNLDPVDTATYYCAHLTTLTIFDYWGQGTLVTVSS | ISGLQAEDEADYFCSSYTSSSVVFGGGTKLTVL |
| | (SEQ ID NO: 1935) | (SEQ ID NO: 1943) |
| AB- | QITLKESGPTLVKPTQTLTLTCTFSGFSPSTSGVGVGWIR | QSALTQPASVSGSPGQSITISCTGTRSDVGGYNYVSWY |
| 4495981 | QPPGKALEWLALIYWDDDKRYSPSLKSRLTITQDTSKNQV | QHHPGKAPKLMIYEVSNRPSGVSNRFSGSKSGNTASLT |
| 46 | VLTMTNMDPVDTATYYCAHHSVATIWDYWGQGTLVTVSS | ISGLQAEDEADYYCSSYTSSSTLVFGGGTKLTVL |
| | (SEQ ID NO: 1936) | (SEQ ID NO: 1944) |

TABLE 8
Neutralization data

| | | Pseudovirus Neturalization (μg/mL) | | | | | |
|---|---|---|---|---|---|---|---|
| | | | | | SARS- | | |
| | Neutralization | | | SARS- | CoV2 | SARS- | |
| | (Infectious | SARS- | SARS- | CoV2 | Wuhan | CoV-2 | SARS-CoV-2 |
| | virus; | CoV- | CoV2 | Wuhan | D614G | “Alpha” | “Beta” |
| Antibody ID | (μg/mL)) | 1 | Wuhan | D614G | Repeat* | UKB.1.1.7 | A_SAv2B.1.351 |
| AB-009614 | 0.075 | >50 | 0.142 | 0.040 | 0.114 | >50 | >50 |
| AB-010019 | N/T | 40.46 | 3.050 | 1.040 | 1.605 | 3.402 | >50 |
| AB-009270 | 1.37 | >50 | 0.065 | 0.058 | 0.040 | 0.117 | 0.169 |
| AB-009346 | 2.14 | >50 | 0.774 | 0.177 | 0.189 | 0.114 | >50 |
| AB-009681 | 3.92 | >50 | >50 | 5.514 | 2.83 | >50 | >50 |
| AB-009761 | 4.44 | >50 | 6.53 | 21.68 | 15.74 | 6.07 | >50 |
| AB-009615 | 12.3 | >50 | 27.70 | >50 | >50 | >50 | >50 |
| AB-009620 | 13.3 | >50 | 1.04 | 1.06 | 0.398 | 0.257 | 0.563 |
| AB-009661 | 20.6 | >50 | >50 | >50 | >50 | >50 | >50 |
| AB-009734 | 21.43 | >50 | 42.38 | >50 | >50 | >50 | >50 |
| AB-009769 | 24.47 | >50 | >50 | >50 | 1.78 | >50 | >50 |
| AB-009760 | 32.76 | >50 | 4.10 | 39.1 | 28.0 | 17.7 | >50 |
| AB-009281 | 33.7 | >50 | 0.215 | 0.105 | 0.086 | >50 | >50 |
| SARS-CoV-1 Ab | >50 | 2.61 | >50 | >50 | >50 | >50 | >50 |
| CR3022 (AB- | | | | | | | |
| 009073) | | | | | | | |
| COVA1-21 (AB- | N/T | >50 | 21.0 | 1.72 | 2.30 | >50 | >50 |
| 010159) | | | | | | | |
| CA1 (AB-009265) | 2.46 | >50 | 0.266 | 0.296 | 0.265 | 0.209 | >50 |
| REGN10933 \| | N/T | >50 | 0.0005 | 0.0008 | 0.0014 | 0.0003 | 1.09 |
| Casirivimab (AB- | | | | | | | |
| 010156) | | | | | | | |
| REGN10987 \| | N/T | >50 | 0.0005 | 0.0003 | 0.0004 | 0.0003 | <0.0002 |
| Imdevimab (AB- | | | | | | | |
| 010157) | | | | | | | |
| LY-CoV016 \| JS- | 0.13 | >50 | 0.012 | 0.014 | 0.009 | 0.417 | >50 |
| 016 \|Etesevimab | | | | | | | |
| (AB-009264) | | | | | | | |
| LY-CoV555 \| | N/T | >50 | <0.002 | <0.002 | 0.0002 | 0.0012 | >50 |
| Bamlanivimab | | | | | | | |
| (AB-010160) | | | | | | | |
| Anti-Nucleocapsid | N/T | >50 | >50 | >50 | >50 | >50 | >50 |
| (Neg Control) | | | | | | | |

| | Pseudovirus Neturalization (μg/mL) | | | | | |
|---|---|---|---|---|---|---|
| | | | SARS- | | | |
| | | SARS- | CoV-2 | SARS- | SARS- | SARS- |
| | SARS-CoV-2 | CoV-2 | “Delta - | CoV-2 | CoV-2 | CoV-2 |
| | “Gamma” | “Delta” | plus” | “Epsilon” | “Mu” | “Omicron” |
| Antibody ID | BrazilP.1.B.1.1.28 | B.1.617.2 | B.1.617.2.1 | B.1.427/9 | B.1.621 | B.1.1.529 |
| AB-009614 | >50 | 31.28 | >50 | >50 | >50 | >50 |
| AB-010019 | >50 | 0.158 | >50 | 1.27 | 1.984 | >50 |
| AB-009270 | 0.158 | 0.030 | 0.032 | 0.125 | >50 | |
| AB-009346 | >50 | >50 | >50 | 33.65 | >50 | >50 |
| AB-009681 | >50 | >50 | >50 | >50 | >50 | >50 |
| AB-009761 | 13.9 | >50 | 39.22 | 17.13 | >50 | >50 |
| AB-009615 | >50 | >50 | >50 | 38.35 | >50 | >50 |
| AB-009620 | 0.327 | 0.519 | 0.809 | 0.974 | 0.115 | 12.92 |
| AB-009661 | >50 | >50 | >50 | >50 | >50 | >50 |
| AB-009734 | 40.6 | >50 | >50 | >50 | >50 | >50 |
| AB-009769 | >50 | >50 | >50 | >50 | >50 | >50 |
| AB-009760 | 19.2 | >50 | 46.2 | 14.1 | >50 | >50 |
| AB-009281 | >50 | 0.032 | 2.29 | 0.041 | >50 | >50 |
| SARS-CoV-1 Ab | >50 | >50 | >50 | >50 | >50 | >50 |
| CR3022 (AB- | | | | | | |
| 009073) | | | | | | |
| COVA1-21 (AB- | >50 | >50 | >50 | >50 | >50 | >50 |
| 010159) | | | | | | |
| CA1 (AB-009265) | >50 | 2.19 | 41.49 | 0.33 | 21.19 | >50 |
| REGN10933 \| | 0.666 | 0.001 | 0.001 | 0.001 | 0.0004 | >50 |
| Casirivimab (AB- | | | | | | |
| 010156) | | | | | | |
| REGN10987 \| | 0.0003 | 0.001 | 0.001 | 0.001 | 0.0002 | >50 |
| Imdevimab (AB- | | | | | | |
| 010157) | | | | | | |
| LY-CoV016 \| JS- | >50 | 0.004 | >50 | 0.009 | 0.18 | >50 |
| 016 \|Etesevimab | | | | | | |
| (AB-009264) | | | | | | |
| LY-CoV555 \| | >50 | 19.3 | 6.93 | 7.82 | >50 | >50 |
| Bamlanivimab | | | | | | |
| (AB-010160) | | | | | | |
| Anti-Nucleocapsid | >50 | >50 | >50 | >50 | >50 | >50 |
| (Neg Control) | | | | | | |

TABLE 9
Characteristics of the SARS-CoV2 variants

| Residue | Wuhan | | | | | | | |
|---|---|---|---|---|---|---|---|---|
| in Spike | D614 | Alpha | Beta | Gamma | Delta | Epsilon | Mu | Omicron |
| | | UK | SA | BR | B.1.617.2 | B.1.427/B.1. | B.1.621 | B.1.1.529 |
| | | variant | B.1.351v2 | variant | | | | |
| | | B.1.1.7 | | P.1 | | | | |
| | | | | B.1.1.28 | | | | |
| 13 | | | | | | S13I | | |
| 18 | | | L18F | L18F | | | | |
| 19 | | | | | T19R | | | |
| 20 | | | | T20N | | | | |
| 26 | | | | P26S | | | | |
| 67 | | | | | | | | A67V |
| 69 | | DEL69-70 | | | | | | DEL69-70 |
| 89 | | | D80A | | | | | |
| 95 | | | | | | | T95I | T95I |
| 138 | | | | D138Y | | | | |
| 142 | | | | | | | | DEL142-144 |
| 144 | | | | | | | Y144S | |
| 145 | | DEL145 | | | | | Y145N | Y145D |
| 152 | | | | | | W152C | | |
| 157 | | | | | DEL157-158 | | | |
| 190 | | | | R190S | | | | |
| 211 | | | | | | | | DEL211 |
| 212 | | | | | | | | L212I |
| 215 | | | D215G | | | | | |
| 242 | | | DEL242-244 | | | | | |
| 246 | | | R246I | | | | | |
| 339 | | | | | | | | G339D |
| 346 | | | | | | | R346K | |
| 371 | | | | | | | | S371L |
| 373 | | | | | | | | S373P |
| 375 | | | | | | | | S375F |
| 417 | | | K417N* | K417T* | K417T* | | | K417N* |
| 440 | | | | | | | | N440K |
| 446 | | | | | | | | G446S |
| 452 | | | | | L452R* | L452R* | | |
| 477 | | | | | | | | S477N |
| 478 | | | | | T478K | | | T478K |
| 484 | | | E484K* | E484K* | | | E484K* | E484A* |
| 493 | | | | | | | | Q493R |
| 496 | | | | | | | | G496S |
| 498 | | | | | | | | Q498R |
| 501 | | N501Y* | N501Y* | N501Y* | | | N501Y* | N501Y* |
| 505 | | | | | | | | Y505H |
| 547 | | | | | | | | T547K |
| 570 | | A570D | | | | | | |
| 614 | D614G | D614G | D614G | D614G | D614G | D614G | D614G | D614G |
| 655 | | | | H655Y | | | | H655Y |
| 679 | | | | | | | | N679K |
| 681 | | P681H | | | P681R | | P681H | P681H |
| 701 | | | A701V | | | | | |
| 716 | | T716I | | | | | | |
| 764 | | | | | | | | N764K |
| 796 | | | | | | | | D796Y |
| 856 | | | | | | | | N856K |
| 950 | | | | | D950N | | D950N | |
| 954 | | | | | | | | Q954H |
| 969 | | | | | | | | N969K |
| 981 | | | | | | | | L981F |
| 982 | | S982A | | | | | | |
| 1027 | | | | T1027I | | | | |
| 1118 | | D1118H | | | | | | |

Note:
modifications of residues indicated by * may impact the binding of an antibody that had binding activity against the original SARS-CoV-2 strain.

### REFERENCES

[0256] Wrammert J, et al., Rapid and massive virus-specific plasmablast responses during acute dengue virus infection in humans. J Virol. 86, 2911-2918 (2012).
[0257] DeFalco J et al., Non-progressing cancer patients have persistent B cell responses expressing shared antibody paratopes that target public tumor antigens. Clin Immunol. 187, 37-45 (2018).
[0258] Zhiqiang Ku, et al., Antibody therapies for the treatment of COVID-19, Antibody Therapeutics, Volume 3, Issue 2, April 2020, Pages 101-108.
[0259] Walls et al., Structure, Function, and Antigenicity of the SARS-CoV-2 Spike Glycoprotein, 2020, Cell 180, 1-12, Mar. 19, 2020.
[0260] Claudia A. Castro Jaramillo, et al. (2017) Toward in vitro-to-in vivo translation of monoclonal antibody pharmacokinetics: Application of a neonatal Fc receptor-mediated transcytosis assay to understand the interplaying clearance mechanisms, mAbs, 9:5, 781-791, DOI: 10.1080/19420862.2017.1320008.
[0261] Chung S, Nguyen V, Lin Y L, et al. An in vitro FcRn-dependent transcytosis assay as a screening tool for predictive assessment of nonspecific clearance of antibody therapeutics in humans. MAbs. 2019; 11(5):942-955. doi:10.1080/19420862.2019.1605270.
[0262] Rogers et al., “Rapid isolation of potent SARS-CoV-2 neutralizing antibodies and protection in a small animal model.” doi://doi.org/10.1101/2020.05.11.088674.

[0263] It is understood that the examples and embodiments described herein are for illustrative purposes only and that various modifications may be suggested to persons skilled in the art after reviewing this disclosure, which are to be included within the scope of the appended claims. All publications, sequence accession numbers, patents, and patent applications cited herein are hereby incorporated by reference in their entirety for all purposes.

1. An antibody that inhibits binding of a coronavirus to a cell or reduces infection of a cell by a coronavirus, optionally wherein the coronavirus is a member of the betacoronavirus genus, and optionally wherein the wherein the coronavirus is a Severe acute respiratory syndrome coronavirus 2 (SARS-CoV-2).

2-3. (canceled)

4. The antibody of claim 1, wherein the coronavirus is a variant of SARS-CoV-2 selected from the group consisting of the Alpha, Beta, Gamma, Delta, Epsilon, Mu, and Omicron variants.

5. The antibody of claim 1, wherein the antibody comprises all six CDRs of an antibody selected from the group consisting of AB-009614, AB-010019, AB-009270, AB-009346, AB-009681, AB-009761, AB-009620, AB-009734, AB-009760, and AB-009281, or wherein the antibody comprises both the VH and VL of an antibody selected from the group consisting of AB-009614, AB-010019, AB-009270, AB-009346, AB-009681, AB-009761, AB-009620, AB-009734, AB-009760, and AB-009281.

6. The antibody of The antibody of claim 1, wherein the antibody inhibits binding of Alpha, Beta, Gamma, Delta, Epsilon, Mu, and Omicron variants of SARS-CoV-2 and/or reduces infection of a cell by Alpha, Beta, Gamma, Delta, Epsilon, Mu, and Omicron variants of SARS-CoV-2.

7. (canceled)

8. The antibody of claim 1, wherein the antibody comprises the LCDRs and HCDRs of an antibody listed in Table 4.

9. The antibody of claim 1, wherein the antibody comprises
i) a VH amino acid sequence and a VL amino acid sequence listed in Table 5, or ii) a VH amino acid sequence with at least 70% identity to the VH amino acid sequence in Table 5 and a VL amino acid sequence with at least 70% identity to the VL amino acid sequence in Table 5, wherein variations as compared to the VH amino acid sequence or the VL amino acid sequence in Table 5 are in the framework regions only.

10. The antibody of claim 1, wherein the antibody comprises all six CDRs of an antibody in Table 4 and wherein the antibody comprises heavy chain framework regions having at least 70% sequence identity to the heavy chain framework regions in the same antibody in Table 4, and/or light chain framework regions having at least 70% sequence identity to the light chain framework regions of the same antibody in Table 4.

11-19. (canceled)

20. The antibody of claim 1, wherein the antibody binds to the S trimer encoded by the coronavirus, and optionally wherein the antibody binds to RBD, S1 monomer and S trimer.

21. (canceled)

22. The antibody of claim 20, wherein the antibody does not bind to the S2 protein.

23. The antibody of claim 1, wherein the antibody inhibits binding of the coronavirus to a receptor on the surface of the cell, optionally wherein the cell surface receptor is ACE2.

24. (canceled)

25. An isolated antibody or an antibody fragment of claim 1, optionally, wherein the antibody is a chimeric antibody, a multispecific antibody, a bispecific antibody, an scFv, or a Fab.

26-27. (canceled)

28. A pharmaceutical composition comprising the antibody of claim 1.

29. A recombinant nucleic acid encoding an antibody or a fragment of an antibody of claim 1.

30. An expression vector comprising a heterologous polynucleotide encoding a heavy chain variable region listed in Table 5, or comprising a heterologous polynucleotide encoding a light chain variable region listed in Table 5, or comprising a heterologous polynucleotide encoding a cognate pair of heavy and light chain variable regions listed in Table 5.

31-32. (canceled)

33. A host cell that comprises an expression vector of claim 30.

34. A method of producing an antibody that inhibits binding of a coronavirus to a cell, the method comprising culturing the host cell of claim 33 under conditions in which the polynucleotide encoding the heavy chain and the polynucleotide encoding the light chain are expressed.

35. (canceled)

36. A method of inducing an immune response, the method comprising administering an antibody of claim 1.

37-38. (canceled)

39. A method of treating a patient infected with a coronavirus, the method comprising administering a therapeutically effective amount of the antibody of claim 1, to the patient, optionally wherein the method further comprises administering a second treatment to the patient, wherein the second treatment is selected from an anti-viral agent or an anti-inflammatory agent, and optionally wherein the second treatment comprises an antibody that binds SARS-CoV-2.

40-44. (canceled)

45. A method of identifying a patient that is infected with a coronavirus, the method comprising detecting binding of the antibody of claim 1 to a sample obtained from the patient, wherein binding greater than a negative control value indicates the patient is infected with the coronavirus.

46-48. (canceled)

49. A method of identifying an antibody having anti-viral activity, the method comprising mutagenizing a polynucleotide encoding a heavy chain variable region or a light chain variable region of an antibody of claim 1, expressing an antibody comprising the mutagenized heavy chain or light chain variable region; and selecting an antibody that inhibits binding of the virus to a cell.

50-56. (canceled)

The application's sequence listing, which the Patent Office published only in electronic form, follows.

SEQUENCE LISTING (1944 sequences)

SEQ ID NO: 1 - protein, 10 aa, Artificial Sequence
  Description of Artificial Sequence: Synthetic peptide
GYTFTSYGIS

SEQ ID NO: 2 - protein, 10 aa, Artificial Sequence
  Description of Artificial Sequence: Synthetic peptide
GFTFTSSAMQ

SEQ ID NO: 3 - protein, 10 aa, Artificial Sequence
  Description of Artificial Sequence: Synthetic peptide
GYTLTELSMH

SEQ ID NO: 4 - protein, 10 aa, Artificial Sequence
  Description of Artificial Sequence: Synthetic peptide
GGTFSSYAIS

SEQ ID NO: 5 - protein, 12 aa, Artificial Sequence
  Description of Artificial Sequence: Synthetic peptide
GFSLSTSGMRVS

SEQ ID NO: 6 - protein, 12 aa, Artificial Sequence
  Description of Artificial Sequence: Synthetic peptide
GFSLSTSGMRVS

SEQ ID NO: 7 - protein, 10 aa, Artificial Sequence
  Description of Artificial Sequence: Synthetic peptide
GFTFSSYAMS

SEQ ID NO: 8 - protein, 10 aa, Artificial Sequence
  Description of Artificial Sequence: Synthetic peptide
GFTFSSYAMH

SEQ ID NO: 9 - protein, 10 aa, Artificial Sequence
  Description of Artificial Sequence: Synthetic peptide
GFTFSSYAMH

SEQ ID NO: 10 - protein, 10 aa, Artificial Sequence
  Description of Artificial Sequence: Synthetic peptide
GFTFSSYAMH

SEQ ID NO: 11 - protein, 10 aa, Artificial Sequence
  Description of Artificial Sequence: Synthetic peptide
GFTFSSYGMH

SEQ ID NO: 12 - protein, 10 aa, Artificial Sequence
  Description of Artificial Sequence: Synthetic peptide
GFTVSSNYMS

SEQ ID NO: 13 - protein, 10 aa, Artificial Sequence
  Description of Artificial Sequence: Synthetic peptide
GFTVSSNYMS

SEQ ID NO: 14 - protein, 10 aa, Artificial Sequence
  Description of Artificial Sequence: Synthetic peptide
GFTVSSNYMS

SEQ ID NO: 15 - protein, 12 aa, Artificial Sequence
  Description of Artificial Sequence: Synthetic peptide
GGSISSGGYYWS

SEQ ID NO: 16 - protein, 12 aa, Artificial Sequence
  Description of Artificial Sequence: Synthetic peptide
GGSISSGGYYWS

SEQ ID NO: 17 - protein, 12 aa, Artificial Sequence
  Description of Artificial Sequence: Synthetic peptide
GGSISSGDYYWS

SEQ ID NO: 18 - protein, 12 aa, Artificial Sequence
  Description of Artificial Sequence: Synthetic peptide
GGSISSSSYYWG

SEQ ID NO: 19 - protein, 10 aa, Artificial Sequence
  Description of Artificial Sequence: Synthetic peptide
GGSISSYYWS

SEQ ID NO: 20 - protein, 10 aa, Artificial Sequence
  Description of Artificial Sequence: Synthetic peptide
GYSFTSYWIG

SEQ ID NO: 21 - protein, 10 aa, Artificial Sequence
  Description of Artificial Sequence: Synthetic peptide
GFAFSDHHMD

SEQ ID NO: 22 - protein, 10 aa, Artificial Sequence
  Description of Artificial Sequence: Synthetic peptide
GFTFTTYAMF

SEQ ID NO: 23 - protein, 10 aa, Artificial Sequence
  Description of Artificial Sequence: Synthetic peptide
GFTVRYNYMS

SEQ ID NO: 24 - protein, 10 aa, Artificial Sequence
  Description of Artificial Sequence: Synthetic peptide
GFNFNNYGMH

SEQ ID NO: 25 - protein, 10 aa, Artificial Sequence
  Description of Artificial Sequence: Synthetic peptide
GFTLSTYSVT

SEQ ID NO: 26 - protein, 10 aa, Artificial Sequence
  Description of Artificial Sequence: Synthetic peptide
GFTFSSYAMH

SEQ ID NO: 27 - protein, 10 aa, Artificial Sequence
  Description of Artificial Sequence: Synthetic peptide
GYTFTSYDIN

SEQ ID NO: 28 - protein, 10 aa, Artificial Sequence
  Description of Artificial Sequence: Synthetic peptide
GYTFTSYGIS

SEQ ID NO: 29 - protein, 10 aa, Artificial Sequence
  Description of Artificial Sequence: Synthetic peptide
GGSISSHYWS

SEQ ID NO: 30 - protein, 10 aa, Artificial Sequence
  Description of Artificial Sequence: Synthetic peptide
GYTFSNYYMH

SEQ ID NO: 31 - protein, 10 aa, Artificial Sequence
  Description of Artificial Sequence: Synthetic peptide
GFTFSSYRMN

SEQ ID NO: 32 - protein, 10 aa, Artificial Sequence
  Description of Artificial Sequence: Synthetic peptide
GGSFTNYYWN

SEQ ID NO: 33 - protein, 12 aa, Artificial Sequence
  Description of Artificial Sequence: Synthetic peptide
GGSIISTSHYWG

SEQ ID NO: 34 - protein, 10 aa, Artificial Sequence
  Description of Artificial Sequence: Synthetic peptide
GFTFSTYWMT

SEQ ID NO: 35 - protein, 10 aa, Artificial Sequence
  Description of Artificial Sequence: Synthetic peptide
GFTFSDYAMT

SEQ ID NO: 36 - protein, 10 aa, Artificial Sequence
  Description of Artificial Sequence: Synthetic peptide
GFTFSSYSMS

SEQ ID NO: 37 - protein, 10 aa, Artificial Sequence
  Description of Artificial Sequence: Synthetic peptide
GYTFTSYQMH

SEQ ID NO: 38 - protein, 12 aa, Artificial Sequence
  Description of Artificial Sequence: Synthetic peptide
GGSISGRGYFWT

SEQ ID NO: 39 - protein, 10 aa, Artificial Sequence
  Description of Artificial Sequence: Synthetic peptide
GFSFNSYWMS

SEQ ID NO: 40 - protein, 10 aa, Artificial Sequence
  Description of Artificial Sequence: Synthetic peptide
VGSISSHYWS

SEQ ID NO: 41 - protein, 10 aa, Artificial Sequence
  Description of Artificial Sequence: Synthetic peptide
GFTFSSYAMS

SEQ ID NO: 42 - protein, 10 aa, Artificial Sequence
  Description of Artificial Sequence: Synthetic peptide
GYTFTSYDIN

SEQ ID NO: 43 - protein, 10 aa, Artificial Sequence
  Description of Artificial Sequence: Synthetic peptide
GFIFSNYWMS

SEQ ID NO: 44 - protein, 10 aa, Artificial Sequence
  Description of Artificial Sequence: Synthetic peptide
GGSFSGYYWS

SEQ ID NO: 45 - protein, 10 aa, Artificial Sequence
  Description of Artificial Sequence: Synthetic peptide
GGSISSHYWS

SEQ ID NO: 46 - protein, 10 aa, Artificial Sequence
  Description of Artificial Sequence: Synthetic peptide
GYTFTSYGIS

SEQ ID NO: 47 - protein, 10 aa, Artificial Sequence
  Description of Artificial Sequence: Synthetic peptide
GFTFSNYWMH

SEQ ID NO: 48 - protein, 10 aa, Artificial Sequence
  Description of Artificial Sequence: Synthetic peptide
GYTFTSYDIN

SEQ ID NO: 49 - protein, 12 aa, Artificial Sequence
  Description of Artificial Sequence: Synthetic peptide
GAFISTSNSFWG

SEQ ID NO: 50 - protein, 10 aa, Artificial Sequence
  Description of Artificial Sequence: Synthetic peptide
GFSFSNDWLS

SEQ ID NO: 51 - protein, 10 aa, Artificial Sequence
  Description of Artificial Sequence: Synthetic peptide
GGTLSRCVIT

SEQ ID NO: 52 - protein, 12 aa, Artificial Sequence
  Description of Artificial Sequence: Synthetic peptide
GGSISDGDYYWS

SEQ ID NO: 53 - protein, 12 aa, Artificial Sequence
  Description of Artificial Sequence: Synthetic peptide
GDSISGTKNYWA

SEQ ID NO: 54 - protein, 10 aa, Artificial Sequence
  Description of Artificial Sequence: Synthetic peptide
GYSLSLLTMY

SEQ ID NO: 55 - protein, 10 aa, Artificial Sequence
  Description of Artificial Sequence: Synthetic peptide
GFTFSDYDIS

SEQ ID NO: 56 - protein, 10 aa, Artificial Sequence
  Description of Artificial Sequence: Synthetic peptide
GFTFNNYGMH

SEQ ID NO: 57 - protein, 12 aa, Artificial Sequence
  Description of Artificial Sequence: Synthetic peptide
GGSISSSSYYWG

SEQ ID NO: 58 - protein, 10 aa, Artificial Sequence
  Description of Artificial Sequence: Synthetic peptide
GLPFSNPRMS

SEQ ID NO: 59 - protein, 10 aa, Artificial Sequence
  Description of Artificial Sequence: Synthetic peptide
GTTFSDQFMD

SEQ ID NO: 60 - protein, 12 aa, Artificial Sequence
  Description of Artificial Sequence: Synthetic peptide
GGSISSSSYYWG

SEQ ID NO: 61 - protein, 12 aa, Artificial Sequence
  Description of Artificial Sequence: Synthetic peptide
GGSISSSSYYWG

SEQ ID NO: 62 - protein, 12 aa, Artificial Sequence
  Description of Artificial Sequence: Synthetic peptide
GFSLNTAGMRVN

SEQ ID NO: 63 - protein, 10 aa, Artificial Sequence
  Description of Artificial Sequence: Synthetic peptide
TFIFNNYAMS

SEQ ID NO: 64 - protein, 10 aa, Artificial Sequence
  Description of Artificial Sequence: Synthetic peptide
GGSFAGYYWS

SEQ ID NO: 65 - protein, 12 aa, Artificial Sequence
  Description of Artificial Sequence: Synthetic peptide
GGSITSRFDYWV

SEQ ID NO: 66 - protein, 10 aa, Artificial Sequence
  Description of Artificial Sequence: Synthetic peptide
GGSISSHYWS

SEQ ID NO: 67 - protein, 10 aa, Artificial Sequence
  Description of Artificial Sequence: Synthetic peptide
GFSFSSYAMH

SEQ ID NO: 68 - protein, 10 aa, Artificial Sequence
  Description of Artificial Sequence: Synthetic peptide
GFTFSSYAMS

SEQ ID NO: 69 - protein, 10 aa, Artificial Sequence
  Description of Artificial Sequence: Synthetic peptide
GFTFSSYGMH

SEQ ID NO: 70 - protein, 10 aa, Artificial Sequence
  Description of Artificial Sequence: Synthetic peptide
GGSISSHYWS

SEQ ID NO: 71 - protein, 10 aa, Artificial Sequence
  Description of Artificial Sequence: Synthetic peptide
GYTLTELSMH

SEQ ID NO: 72 - protein, 12 aa, Artificial Sequence
  Description of Artificial Sequence: Synthetic peptide
GGSISSSSYYWG

SEQ ID NO: 73 - protein, 10 aa, Artificial Sequence
  Description of Artificial Sequence: Synthetic peptide
GFTFSTYAMS

SEQ ID NO: 74 - protein, 10 aa, Artificial Sequence
  Description of Artificial Sequence: Synthetic peptide
GFTFNNHGMH

SEQ ID NO: 75 - protein, 10 aa, Artificial Sequence
  Description of Artificial Sequence: Synthetic peptide
GFTFSSYSMN

SEQ ID NO: 76 - protein, 10 aa, Artificial Sequence
  Description of Artificial Sequence: Synthetic peptide
GFSFSTYAMH

SEQ ID NO: 77 - protein, 10 aa, Artificial Sequence
  Description of Artificial Sequence: Synthetic peptide
GFTFDDYGMS

SEQ ID NO: 78 - protein, 10 aa, Artificial Sequence
  Description of Artificial Sequence: Synthetic peptide
SFIFSRYAMH

SEQ ID NO: 79 - protein, 12 aa, Artificial Sequence
  Description of Artificial Sequence: Synthetic peptide
GFSLSNARMGVS

SEQ ID NO: 80 - protein, 10 aa, Artificial Sequence
  Description of Artificial Sequence: Synthetic peptide
GFSFSTHGMH

SEQ ID NO: 81 - protein, 10 aa, Artificial Sequence
  Description of Artificial Sequence: Synthetic peptide
GFIIDDYAMS

SEQ ID NO: 82 - protein, 10 aa, Artificial Sequence
  Description of Artificial Sequence: Synthetic peptide
GGTLSTYAIS

SEQ ID NO: 83 - protein, 10 aa, Artificial Sequence
  Description of Artificial Sequence: Synthetic peptide
GYMFSKFGIS

SEQ ID NO: 84 - protein, 10 aa, Artificial Sequence
  Description of Artificial Sequence: Synthetic peptide
GYAFGSSDIN

SEQ ID NO: 85 - protein, 10 aa, Artificial Sequence
  Description of Artificial Sequence: Synthetic peptide
GFNFSNYGMS

SEQ ID NO: 86 - protein, 12 aa, Artificial Sequence
  Description of Artificial Sequence: Synthetic peptide
SGSIRSSNYYWG

SEQ ID NO: 87 - protein, 10 aa, Artificial Sequence
  Description of Artificial Sequence: Synthetic peptide
GYTFVDYAIH

SEQ ID NO: 88 - protein, 12 aa, Artificial Sequence
  Description of Artificial Sequence: Synthetic peptide
GGSISSSSYYWG

SEQ ID NO: 89 - protein, 10 aa, Artificial Sequence
  Description of Artificial Sequence: Synthetic peptide
GYTFTSYYVH

SEQ ID NO: 90 - protein, 10 aa, Artificial Sequence
  Description of Artificial Sequence: Synthetic peptide
GYRYTNYWVA

SEQ ID NO: 91 - protein, 10 aa, Artificial Sequence
  Description of Artificial Sequence: Synthetic peptide
GYTFTSYDIN

SEQ ID NO: 92 - protein, 10 aa, Artificial Sequence
  Description of Artificial Sequence: Synthetic peptide
GFIFNNYGLT

SEQ ID NO: 93 - protein, 10 aa, Artificial Sequence
  Description of Artificial Sequence: Synthetic peptide
GYTFTSYYMH

SEQ ID NO: 94 - protein, 10 aa, Artificial Sequence
  Description of Artificial Sequence: Synthetic peptide
GFTFSSFAMT

SEQ ID NO: 95 - protein, 10 aa, Artificial Sequence
  Description of Artificial Sequence: Synthetic peptide
GFTFSSYAMH

SEQ ID NO: 96 - protein, 10 aa, Artificial Sequence
  Description of Artificial Sequence: Synthetic peptide
GYTLTELSMH

SEQ ID NO: 97 - protein, 12 aa, Artificial Sequence
  Description of Artificial Sequence: Synthetic peptide
GFSLSTSGMCVS

SEQ ID NO: 98 - protein, 12 aa, Artificial Sequence
  Description of Artificial Sequence: Synthetic peptide
GFSLSTSGMCVS

SEQ ID NO: 99 - protein, 10 aa, Artificial Sequence
  Description of Artificial Sequence: Synthetic peptide
GFTFSSYGMH

SEQ ID NO: 100 - protein, 10 aa, Artificial Sequence
  Description of Artificial Sequence: Synthetic peptide
GFTFSSYGMH

SEQ ID NO: 101 - protein, 10 aa, Artificial Sequence
  Description of Artificial Sequence: Synthetic peptide
GFTFSSYGMH

SEQ ID NO: 102 - protein, 10 aa, Artificial Sequence
  Description of Artificial Sequence: Synthetic peptide
GYTLIELSMH

SEQ ID NO: 103 - protein, 12 aa, Artificial Sequence
  Description of Artificial Sequence: Synthetic peptide
GFSLSTSGVGVG

SEQ ID NO: 104 - protein, 10 aa, Artificial Sequence
  Description of Artificial Sequence: Synthetic peptide
GGSFSGYYWS

SEQ ID NO: 105 - protein, 10 aa, Artificial Sequence
  Description of Artificial Sequence: Synthetic peptide
GFNFSFYWMS

SEQ ID NO: 106 - protein, 10 aa, Artificial Sequence
  Description of Artificial Sequence: Synthetic peptide
GGSISSYYWS

SEQ ID NO: 107 - protein, 12 aa, Artificial Sequence
  Description of Artificial Sequence: Synthetic peptide
GFSLSTSGMRVS

SEQ ID NO: 108 - protein, 10 aa, Artificial Sequence
  Description of Artificial Sequence: Synthetic peptide
GFTFSNAWMS

SEQ ID NO: 109 - protein, 10 aa, Artificial Sequence
  Description of Artificial Sequence: Synthetic peptide
GGTFSSYAIS

SEQ ID NO: 110 - protein, 10 aa, Artificial Sequence
  Description of Artificial Sequence: Synthetic peptide
GFTFSDYYMS

SEQ ID NO: 111 - protein, 10 aa, Artificial Sequence
  Description of Artificial Sequence: Synthetic peptide
GFTFSSYAMH

SEQ ID NO: 112 - protein, 10 aa, Artificial Sequence
  Description of Artificial Sequence: Synthetic peptide
GGSFSGYSWS

SEQ ID NO: 113 - protein, 10 aa, Artificial Sequence
  Description of Artificial Sequence: Synthetic peptide
GFTFGDYAMS

SEQ ID NO: 114 - protein, 10 aa, Artificial Sequence
  Description of Artificial Sequence: Synthetic peptide
GFTFSSYGMH

SEQ ID NO: 115 - protein, 10 aa, Artificial Sequence
  Description of Artificial Sequence: Synthetic peptide
GFTFSSYAMH

SEQ ID NO: 116 - protein, 10 aa, Artificial Sequence
  Description of Artificial Sequence: Synthetic peptide
GYTFAGYDIN

SEQ ID NO: 117 - protein, 10 aa, Artificial Sequence
  Description of Artificial Sequence: Synthetic peptide
GFTFSSYWMS

SEQ ID NO: 118 - protein, 10 aa, Artificial Sequence
  Description of Artificial Sequence: Synthetic peptide
GFTFSSYAMH

SEQ ID NO: 119 - protein, 10 aa, Artificial Sequence
  Description of Artificial Sequence: Synthetic peptide
GGSFSGYYWS

SEQ ID NO: 120 - protein, 10 aa, Artificial Sequence
  Description of Artificial Sequence: Synthetic peptide
GFTFSSYWMS

SEQ ID NO: 121 - protein, 10 aa, Artificial Sequence
  Description of Artificial Sequence: Synthetic peptide
GFTFSSYSMN

SEQ ID NO: 122 - protein, 10 aa, Artificial Sequence
  Description of Artificial Sequence: Synthetic peptide
GFTFSSYAMS

SEQ ID NO: 123 - protein, 10 aa, Artificial Sequence
  Description of Artificial Sequence: Synthetic peptide
GFTFSSYGMH

SEQ ID NO: 124 - protein, 10 aa, Artificial Sequence
  Description of Artificial Sequence: Synthetic peptide
GFSFRSFGMH

SEQ ID NO: 125 - protein, 10 aa, Artificial Sequence
  Description of Artificial Sequence: Synthetic peptide
GFTFSSYAMS

SEQ ID NO: 126 - protein, 10 aa, Artificial Sequence
  Description of Artificial Sequence: Synthetic peptide
GGSISSYYWS

SEQ ID NO: 127 - protein, 10 aa, Artificial Sequence
  Description of Artificial Sequence: Synthetic peptide
GGSFSGYYWS

SEQ ID NO: 128 - protein, 12 aa, Artificial Sequence
  Description of Artificial Sequence: Synthetic peptide
GFSLSTSGMCVS

SEQ ID NO: 129 - protein, 10 aa, Artificial Sequence
  Description of Artificial Sequence: Synthetic peptide
GFTFSTYGMH

SEQ ID NO: 130 - protein, 10 aa, Artificial Sequence
  Description of Artificial Sequence: Synthetic peptide
GGTFSSYAIS

SEQ ID NO: 131 - protein, 10 aa, Artificial Sequence
  Description of Artificial Sequence: Synthetic peptide
GGSISSYYWS

SEQ ID NO: 132 - protein, 12 aa, Artificial Sequence
  Description of Artificial Sequence: Synthetic peptide
GGSISSSSYYWG

SEQ ID NO: 133 - protein, 10 aa, Artificial Sequence
  Description of Artificial Sequence: Synthetic peptide
GFTFSSYAMH

SEQ ID NO: 134 - protein, 10 aa, Artificial Sequence
  Description of Artificial Sequence: Synthetic peptide
RFSTSENYVD

SEQ ID NO: 135 - protein, 10 aa, Artificial Sequence
  Description of Artificial Sequence: Synthetic peptide
GFTFSSYAMH

SEQ ID NO: 136 - protein, 12 aa, Artificial Sequence
  Description of Artificial Sequence: Synthetic peptide
GGSISSSSYYWG

SEQ ID NO: 137 - protein, 10 aa, Artificial Sequence
  Description of Artificial Sequence: Synthetic peptide
GFTLNTYAMS

SEQ ID NO: 138 - protein, 10 aa, Artificial Sequence
  Description of Artificial Sequence: Synthetic peptide
GGSFSGYYWS

SEQ ID NO: 139 - protein, 11 aa, Artificial Sequence
  Description of Artificial Sequence: Synthetic peptide
GDSIYSDYWWT

SEQ ID NO: 140 - protein, 10 aa, Artificial Sequence
  Description of Artificial Sequence: Synthetic peptide
GGSLGGYYWT

SEQ ID NO: 141 - protein, 10 aa, Artificial Sequence
  Description of Artificial Sequence: Synthetic peptide
GFVFRRYWMH

SEQ ID NO: 142 - protein, 10 aa, Artificial Sequence
  Description of Artificial Sequence: Synthetic peptide
GGSYSSYTLS

SEQ ID NO: 143 - protein, 10 aa, Artificial Sequence
  Description of Artificial Sequence: Synthetic peptide
GYTFTHYYIH

SEQ ID NO: 144 - protein, 10 aa, Artificial Sequence
  Description of Artificial Sequence: Synthetic peptide
QFIFSSYAMH

SEQ ID NO: 145 - protein, 10 aa, Artificial Sequence
  Description of Artificial Sequence: Synthetic peptide
GFTLRTYAMH

SEQ ID NO: 146 - protein, 12 aa, Artificial Sequence
  Description of Artificial Sequence: Synthetic peptide
GGSFSYYSWSWS

SEQ ID NO: 147 - protein, 10 aa, Artificial Sequence
  Description of Artificial Sequence: Synthetic peptide
GGSFNNHAWT

SEQ ID NO: 148 - protein, 12 aa, Artificial Sequence
  Description of Artificial Sequence: Synthetic peptide
GGSFTNYWWRWT

SEQ ID NO: 149 - protein, 10 aa, Artificial Sequence
  Description of Artificial Sequence: Synthetic peptide
GGSFSGYYWS

SEQ ID NO: 150 - protein, 10 aa, Artificial Sequence
  Description of Artificial Sequence: Synthetic peptide
GGSFSNYYWN

SEQ ID NO: 151 - protein, 10 aa, Artificial Sequence
  Description of Artificial Sequence: Synthetic peptide
GYTLSKLFMH

SEQ ID NO: 152 - protein, 10 aa, Artificial Sequence
  Description of Artificial Sequence: Synthetic peptide
GFKFDDYAMH

SEQ ID NO: 153 - protein, 10 aa, Artificial Sequence
  Description of Artificial Sequence: Synthetic peptide
GFTFSRYAMA

SEQ ID NO: 154 - protein, 10 aa, Artificial Sequence
  Description of Artificial Sequence: Synthetic peptide
GGIFNSYKIT

SEQ ID NO: 155 - protein, 10 aa, Artificial Sequence
  Description of Artificial Sequence: Synthetic peptide
GYIFTNYDLS

SEQ ID NO: 156 - protein, 10 aa, Artificial Sequence
  Description of Artificial Sequence: Synthetic peptide
GGTFSNNAIS

SEQ ID NO: 157 - protein, 10 aa, Artificial Sequence
  Description of Artificial Sequence: Synthetic peptide
HGSIRSQYWS

SEQ ID NO: 158 - protein, 10 aa, Artificial Sequence
  Description of Artificial Sequence: Synthetic peptide
GYTFINYWIG

SEQ ID NO: 159 - protein, 10 aa, Artificial Sequence
  Description of Artificial Sequence: Synthetic peptide
GFTFDNFGFH

SEQ ID NO: 160 - protein, 10 aa, Artificial Sequence
  Description of Artificial Sequence: Synthetic peptide
GFNFNYYGMN

SEQ ID NO: 161 - protein, 10 aa, Artificial Sequence
  Description of Artificial Sequence: Synthetic peptide
GYTFTDYYIH

SEQ ID NO: 162 - protein, 10 aa, Artificial Sequence
  Description of Artificial Sequence: Synthetic peptide
GGTFSSYAIS

SEQ ID NO: 163 - protein, 10 aa, Artificial Sequence
  Description of Artificial Sequence: Synthetic peptide
GYSLTSYAMH

SEQ ID NO: 164 - protein, 10 aa, Artificial Sequence
  Description of Artificial Sequence: Synthetic peptide
GFTFDDYTMH

SEQ ID NO: 165 - protein, 12 aa, Artificial Sequence
  Description of Artificial Sequence: Synthetic peptide
GGSISSTANYWG

SEQ ID NO: 166 - protein, 10 aa, Artificial Sequence
  Description of Artificial Sequence: Synthetic peptide
GYTFTSHYMH

SEQ ID NO: 167 - protein, 10 aa, Artificial Sequence
  Description of Artificial Sequence: Synthetic peptide
GGTFNSYAFT

SEQ ID NO: 168 - protein, 10 aa, Artificial Sequence
  Description of Artificial Sequence: Synthetic peptide
GGTFVNFAIC

SEQ ID NO: 169 - protein, 12 aa, Artificial Sequence
  Description of Artificial Sequence: Synthetic peptide
GLALSNGRMGVS

SEQ ID NO: 170 - protein, 10 aa, Artificial Sequence
  Description of Artificial Sequence: Synthetic peptide
GGTFTNYAIN

SEQ ID NO: 171 - protein, 10 aa, Artificial Sequence
  Description of Artificial Sequence: Synthetic peptide
GYTFTSYWIV

SEQ ID NO: 172 - protein, 10 aa, Artificial Sequence
  Description of Artificial Sequence: Synthetic peptide
GFTFSSYGMN

SEQ ID NO: 173 - protein, 10 aa, Artificial Sequence
  Description of Artificial Sequence: Synthetic peptide
GFTFSSYAMS

SEQ ID NO: 174 - protein, 10 aa, Artificial Sequence
  Description of Artificial Sequence: Synthetic peptide
GITFEDYALH

SEQ ID NO: 175 - protein, 10 aa, Artificial Sequence
  Description of Artificial Sequence: Synthetic peptide
GNTLSELYIY

SEQ ID NO: 176 - protein, 10 aa, Artificial Sequence
  Description of Artificial Sequence: Synthetic peptide
GYTFTNYAVH

SEQ ID NO: 177 - protein, 10 aa, Artificial Sequence
  Description of Artificial Sequence: Synthetic peptide
GFTFGDYAMN

SEQ ID NO: 178 - protein, 12 aa, Artificial Sequence
  Description of Artificial Sequence: Synthetic peptide
GASLISNSYYWG

SEQ ID NO: 179 - protein, 10 aa, Artificial Sequence
  Description of Artificial Sequence: Synthetic peptide
GFTFSNYGMH

SEQ ID NO: 180 - protein, 10 aa, Artificial Sequence
  Description of Artificial Sequence: Synthetic peptide
GFTFSSHGMH

SEQ ID NO: 181 - protein, 10 aa, Artificial Sequence
  Description of Artificial Sequence: Synthetic peptide
GGSISSYYWS

SEQ ID NO: 182 - protein, 12 aa, Artificial Sequence
  Description of Artificial Sequence: Synthetic peptide
GGSISSSSYYWG

SEQ ID NO: 183 - protein, 12 aa, Artificial Sequence
  Description of Artificial Sequence: Synthetic peptide
GGSISSGDYYWS

SEQ ID NO: 184 - protein, 10 aa, Artificial Sequence
  Description of Artificial Sequence: Synthetic peptide
GYTFTSYAMH

SEQ ID NO: 185 - protein, 10 aa, Artificial Sequence
  Description of Artificial Sequence: Synthetic peptide
GGSISSHCWN

SEQ ID NO: 186 - protein, 12 aa, Artificial Sequence
  Description of Artificial Sequence: Synthetic peptide
GGSISSSSYYWG

SEQ ID NO: 187 - protein, 12 aa, Artificial Sequence
  Description of Artificial Sequence: Synthetic peptide
GDSISSGAYYWS

SEQ ID NO: 188 - protein, 10 aa, Artificial Sequence
  Description of Artificial Sequence: Synthetic peptide
GFTFSSFAMS

SEQ ID NO: 189 - protein, 12 aa, Artificial Sequence
  Description of Artificial Sequence: Synthetic peptide
GGSISSSSYYWG

SEQ ID NO: 190 - protein, 10 aa, Artificial Sequence
  Description of Artificial Sequence: Synthetic peptide
GYTLTELSMH

SEQ ID NO: 191 - protein, 10 aa, Artificial Sequence
  Description of Artificial Sequence: Synthetic peptide
GGTFSSYAIS

SEQ ID NO: 192 - protein, 10 aa, Artificial Sequence
  Description of Artificial Sequence: Synthetic peptide
GYSFTSYWIG

SEQ ID NO: 193 - protein, 10 aa, Artificial Sequence
  Description of Artificial Sequence: Synthetic peptide
GFTFSSYAMS

SEQ ID NO: 194 - protein, 10 aa, Artificial Sequence
  Description of Artificial Sequence: Synthetic peptide
GFTFSDYYMS

SEQ ID NO: 195 - protein, 10 aa, Artificial Sequence
  Description of Artificial Sequence: Synthetic peptide
GGSFSGYYWS

SEQ ID NO: 196 - protein, 10 aa, Artificial Sequence
  Description of Artificial Sequence: Synthetic peptide
GGSISSHYWS

SEQ ID NO: 197 - protein, 10 aa, Artificial Sequence
  Description of Artificial Sequence: Synthetic peptide
GFTFSDYYMS

SEQ ID NO: 198 - protein, 12 aa, Artificial Sequence
  Description of Artificial Sequence: Synthetic peptide
GGSISRSSYYWG

SEQ ID NO: 199 - protein, 10 aa, Artificial Sequence
  Description of Artificial Sequence: Synthetic peptide
GYSFTSYWIG

SEQ ID NO: 200 - protein, 12 aa, Artificial Sequence
  Description of Artificial Sequence: Synthetic peptide
GGSISSSSYYWG

SEQ ID NO: 201 - protein, 10 aa, Artificial Sequence
  Description of Artificial Sequence: Synthetic peptide
GFTFSSYWMS

SEQ ID NO: 202 - protein, 10 aa, Artificial Sequence
  Description of Artificial Sequence: Synthetic peptide
GFTFSSYSMN

SEQ ID NO: 203 - protein, 10 aa, Artificial Sequence
  Description of Artificial Sequence: Synthetic peptide
GFTFSSYWMH

SEQ ID NO: 204 - protein, 12 aa, Artificial Sequence
  Description of Artificial Sequence: Synthetic peptide
GGSISSSSYYWG

SEQ ID NO: 205 - protein, 10 aa, Artificial Sequence
  Description of Artificial Sequence: Synthetic peptide
GYTFTGYYMH

SEQ ID NO: 206 - protein, 12 aa, Artificial Sequence
  Description of Artificial Sequence: Synthetic peptide
GGSISSSSYYWG

SEQ ID NO: 207 - protein, 12 aa, Artificial Sequence
  Description of Artificial Sequence: Synthetic peptide
GGSISSSSYYWG

SEQ ID NO: 208 - protein, 12 aa, Artificial Sequence
  Description of Artificial Sequence: Synthetic peptide
GGSISSGGYYWS

SEQ ID NO: 209 - protein, 10 aa, Artificial Sequence
  Description of Artificial Sequence: Synthetic peptide
GFTFSSYSMN

SEQ ID NO: 210 - protein, 12 aa, Artificial Sequence
  Description of Artificial Sequence: Synthetic peptide
GGSISSSSYYWG

SEQ ID NO: 211 - protein, 10 aa, Artificial Sequence
  Description of Artificial Sequence: Synthetic peptide
GFTFSNAWMS

SEQ ID NO: 212 - protein, 12 aa, Artificial Sequence
  Description of Artificial Sequence: Synthetic peptide
GGSISSGDYYWS

SEQ ID NO: 213 - protein, 10 aa, Artificial Sequence
  Description of Artificial Sequence: Synthetic peptide
GFTFSNAWMS

SEQ ID NO: 214 - protein, 10 aa, Artificial Sequence
  Description of Artificial Sequence: Synthetic peptide
GGSISSYYWS

SEQ ID NO: 215 - protein, 10 aa, Artificial Sequence
  Description of Artificial Sequence: Synthetic peptide
AGSISSHYWS

SEQ ID NO: 216 - protein, 12 aa, Artificial Sequence
  Description of Artificial Sequence: Synthetic peptide
GGSISSSSYYWG

SEQ ID NO: 217 - protein, 10 aa, Artificial Sequence
  Description of Artificial Sequence: Synthetic peptide
GGSISSYYWS

SEQ ID NO: 218 - protein, 10 aa, Artificial Sequence
  Description of Artificial Sequence: Synthetic peptide
GGSFSGYYWS

SEQ ID NO: 219 - protein, 12 aa, Artificial Sequence
  Description of Artificial Sequence: Synthetic peptide
GGSISSSSYYWG

SEQ ID NO: 220 - protein, 10 aa, Artificial Sequence
  Description of Artificial Sequence: Synthetic peptide
GGSISSHYWS

SEQ ID NO: 221 - protein, 10 aa, Artificial Sequence
  Description of Artificial Sequence: Synthetic peptide
GFTFSSYAMS

SEQ ID NO: 222 - protein, 10 aa, Artificial Sequence
  Description of Artificial Sequence: Synthetic peptide
GFTFSSYAMS

SEQ ID NO: 223 - protein, 12 aa, Artificial Sequence
  Description of Artificial Sequence: Synthetic peptide
GGSISSSSYYWG

SEQ ID NO: 224 - protein, 10 aa, Artificial Sequence
  Description of Artificial Sequence: Synthetic peptide
GGSISSYYWS

SEQ ID NO: 225 - protein, 10 aa, Artificial Sequence
  Description of Artificial Sequence: Synthetic peptide
GYTFTSYGIS

SEQ ID NO: 226 - protein, 10 aa, Artificial Sequence
  Description of Artificial Sequence: Synthetic peptide
GYTLTELSMH

SEQ ID NO: 227 - protein, 10 aa, Artificial Sequence
  Description of Artificial Sequence: Synthetic peptide
GYTFTSYDIN

SEQ ID NO: 228 - protein, 12 aa, Artificial Sequence
  Description of Artificial Sequence: Synthetic peptide
GGSISSSSYYWG

SEQ ID NO: 229 - protein, 12 aa, Artificial Sequence
  Description of Artificial Sequence: Synthetic peptide
GGSISSSSYYWG

SEQ ID NO: 230 - protein, 10 aa, Artificial Sequence
  Description of Artificial Sequence: Synthetic peptide
GYTFTSYYMH

SEQ ID NO: 231 - protein, 10 aa, Artificial Sequence
  Description of Artificial Sequence: Synthetic peptide
GYTFTSYDIN

SEQ ID NO: 232 - protein, 10 aa, Artificial Sequence
  Description of Artificial Sequence: Synthetic peptide
GFTFSSYSMN

SEQ ID NO: 233 - protein, 10 aa, Artificial Sequence
  Description of Artificial Sequence: Synthetic peptide
GFTFSSYWMS

SEQ ID NO: 234 - protein, 12 aa, Artificial Sequence
  Description of Artificial Sequence: Synthetic peptide
GGSISSSSYYWG

SEQ ID NO: 235 - protein, 10 aa, Artificial Sequence
  Description of Artificial Sequence: Synthetic peptide
GFTVSSNYMS

SEQ ID NO: 236 - protein, 17 aa, Artificial Sequence
  Description of Artificial Sequence: Synthetic peptide
WISAYNGNTNYAQKLQG

SEQ ID NO: 237 - protein, 17 aa, Artificial Sequence
  Description of Artificial Sequence: Synthetic peptide
WIVVGSGNTNYAQKFQE

SEQ ID NO: 238 - protein, 17 aa, Artificial Sequence
  Description of Artificial Sequence: Synthetic peptide
GFDPEDGETIYAQKFQG

SEQ ID NO: 239 - protein, 17 aa, Artificial Sequence
  Description of Artificial Sequence: Synthetic peptide
GIIPIFGTANYAQKFQG

SEQ ID NO: 240 - protein, 16 aa, Artificial Sequence
  Description of Artificial Sequence: Synthetic peptide
RIDWDDDKFYSTSLKT

SEQ ID NO: 241 - protein, 16 aa, Artificial Sequence
  Description of Artificial Sequence: Synthetic peptide
RIDWDDDKFYSTSLKT

SEQ ID NO: 242 - protein, 17 aa, Artificial Sequence
  Description of Artificial Sequence: Synthetic peptide
AISGSGGSTYYADSVKG

SEQ ID NO: 243 - protein, 17 aa, Artificial Sequence
  Description of Artificial Sequence: Synthetic peptide
VISYDGSNKYYADSVKG

SEQ ID NO: 244 - protein, 17 aa, Artificial Sequence
  Description of Artificial Sequence: Synthetic peptide
VISYDGSNKYYADSVKG

SEQ ID NO: 245 - protein, 17 aa, Artificial Sequence
  Description of Artificial Sequence: Synthetic peptide
VISYDGSNKYYADSVKG

SEQ ID NO: 246 - protein, 17 aa, Artificial Sequence
  Description of Artificial Sequence: Synthetic peptide
VISYDGSNKYYADSVKG

SEQ ID NO: 247 - protein, 16 aa, Artificial Sequence
  Description of Artificial Sequence: Synthetic peptide
VIYSGGSTYYADSVKG

SEQ ID NO: 248 - protein, 16 aa, Artificial Sequence
  Description of Artificial Sequence: Synthetic peptide
VIYSGGSTYYADSVKG

SEQ ID NO: 249 - protein, 16 aa, Artificial Sequence
  Description of Artificial Sequence: Synthetic peptide
VIYSGGSTYYADSVKG

SEQ ID NO: 250 - protein, 16 aa, Artificial Sequence
  Description of Artificial Sequence: Synthetic peptide
YIYYSGSTYYNPSLKS

SEQ ID NO: 251 - protein, 16 aa, Artificial Sequence
  Description of Artificial Sequence: Synthetic peptide
YIYYSGSTYYNPSLKS

SEQ ID NO: 252 - protein, 16 aa, Artificial Sequence
  Description of Artificial Sequence: Synthetic peptide
YIYYSGSTYYNPSLKS

SEQ ID NO: 253 - protein, 16 aa, Artificial Sequence
  Description of Artificial Sequence: Synthetic peptide
SIYYSGSTYYNPSLKS

SEQ ID NO: 254 - protein, 16 aa, Artificial Sequence
  Description of Artificial Sequence: Synthetic peptide
YIYYSGSTNYNPSLKS

SEQ ID NO: 255 - protein, 17 aa, Artificial Sequence
  Description of Artificial Sequence: Synthetic peptide
IIYPGDSDTRYSPSFQG

SEQ ID NO: 256 - protein, 19 aa, Artificial Sequence
  Description of Artificial Sequence: Synthetic peptide
RIRDKADSYTTEYAASVRG

SEQ ID NO: 257 - protein, 17 aa, Artificial Sequence
  Description of Artificial Sequence: Synthetic peptide
AINAGGAKTHYADSVRG

SEQ ID NO: 258 - protein, 19 aa, Artificial Sequence
  Description of Artificial Sequence: Synthetic peptide
IIYRGDRGGSTYYIDSVKG

SEQ ID NO: 259 - protein, 17 aa, Artificial Sequence
  Description of Artificial Sequence: Synthetic peptide
FISYEGSITHYADSVKG

SEQ ID NO: 260 - protein, 17 aa, Artificial Sequence
  Description of Artificial Sequence: Synthetic peptide
VFSATGGTTDYADSVRG

SEQ ID NO: 261 - protein, 17 aa, Artificial Sequence
  Description of Artificial Sequence: Synthetic peptide
ILWPDGGKKYFADSVKG

SEQ ID NO: 262 - protein, 17 aa, Artificial Sequence
  Description of Artificial Sequence: Synthetic peptide
WMNPNSGNTGYAQKFQG

SEQ ID NO: 263 - protein, 17 aa, Artificial Sequence
  Description of Artificial Sequence: Synthetic peptide
WISAYSGNTNYAQKLQG

SEQ ID NO: 264 - protein, 16 aa, Artificial Sequence
  Description of Artificial Sequence: Synthetic peptide
YIYYSGSTNYNPSLKS

SEQ ID NO: 265 - protein, 17 aa, Artificial Sequence
  Description of Artificial Sequence: Synthetic peptide
IIKPSAGRTIYAQKFVG

SEQ ID NO: 266 - protein, 17 aa, Artificial Sequence
  Description of Artificial Sequence: Synthetic peptide
SISSSSSYIYYANSVKG

SEQ ID NO: 267 - protein, 16 aa, Artificial Sequence
  Description of Artificial Sequence: Synthetic peptide
EINHSGSTNYKPSLKS

SEQ ID NO: 268 - protein, 16 aa, Artificial Sequence
  Description of Artificial Sequence: Synthetic peptide
TIYYSGNTYYNPSLTS

SEQ ID NO: 269 - protein, 17 aa, Artificial Sequence
  Description of Artificial Sequence: Synthetic peptide
NIKPDESEIHYVDSVKG

SEQ ID NO: 270 - protein, 17 aa, Artificial Sequence
  Description of Artificial Sequence: Synthetic peptide
AITENGFTTYYADSMRG

SEQ ID NO: 271 - protein, 17 aa, Artificial Sequence
  Description of Artificial Sequence: Synthetic peptide
VIDNRGGNIHYSDSVRV

SEQ ID NO: 272 - protein, 17 aa, Artificial Sequence
  Description of Artificial Sequence: Synthetic peptide
LIDPDTGGTRYTQNFQG

SEQ ID NO: 273 - protein, 16 aa, Artificial Sequence
  Description of Artificial Sequence: Synthetic peptide
DISSSGSTNYNPFLKS

SEQ ID NO: 274 - protein, 17 aa, Artificial Sequence
  Description of Artificial Sequence: Synthetic peptide
SIKQDGSETYYVDSVKG

SEQ ID NO: 275 - protein, 16 aa, Artificial Sequence
  Description of Artificial Sequence: Synthetic peptide
YIYYSGSTNYNPSLKS

SEQ ID NO: 276 - protein, 17 aa, Artificial Sequence
  Description of Artificial Sequence: Synthetic peptide
AISGSGTSTYYADSVKG

SEQ ID NO: 277 - protein, 17 aa, Artificial Sequence
  Description of Artificial Sequence: Synthetic peptide
WMNPNSGNTGYAQKFQG

SEQ ID NO: 278 - protein, 17 aa, Artificial Sequence
  Description of Artificial Sequence: Synthetic peptide
NIKQDGGEQYYVDSVKG

SEQ ID NO: 279 - protein, 16 aa, Artificial Sequence
  Description of Artificial Sequence: Synthetic peptide
EINHSGSTNYNPSLKS

SEQ ID NO: 280 - protein, 16 aa, Artificial Sequence
  Description of Artificial Sequence: Synthetic peptide
YIYYSGSTNYNPSLKS

SEQ ID NO: 281 - protein, 17 aa, Artificial Sequence
  Description of Artificial Sequence: Synthetic peptide
WISAYNGNTNYAQKLQG

SEQ ID NO: 282 - protein, 17 aa, Artificial Sequence
  Description of Artificial Sequence: Synthetic peptide
SINNDGSNTRYADSVKG

SEQ ID NO: 283 - protein, 17 aa, Artificial Sequence
  Description of Artificial Sequence: Synthetic peptide
WMNPNSGNTGYAQKFQG

SEQ ID NO: 284 - protein, 16 aa, Artificial Sequence
  Description of Artificial Sequence: Synthetic peptide
SENYGGSSYFNPSLKR

SEQ ID NO: 285 - protein, 17 aa, Artificial Sequence
  Description of Artificial Sequence: Synthetic peptide
NINQDGSEKYSVDSVKG

SEQ ID NO: 286 - protein, 17 aa, Artificial Sequence
  Description of Artificial Sequence: Synthetic peptide
RIIPIFGTVNYAQKFQG

SEQ ID NO: 287 - protein, 16 aa, Artificial Sequence
  Description of Artificial Sequence: Synthetic peptide
YISYSGSTYYNPSLKS

SEQ ID NO: 288 - protein, 17 aa, Artificial Sequence
  Description of Artificial Sequence: Synthetic peptide
SFYYNWGSTSYNASLKS

SEQ ID NO: 289 - protein, 17 aa, Artificial Sequence
  Description of Artificial Sequence: Synthetic peptide
SFDPQDGETMYAQKFQG

SEQ ID NO: 290 - protein, 16 aa, Artificial Sequence
  Description of Artificial Sequence: Synthetic peptide
HITLTGRTYYVDSVQG

SEQ ID NO: 291 - protein, 17 aa, Artificial Sequence
  Description of Artificial Sequence: Synthetic peptide
LISYEGSLKYYGDSVRG

SEQ ID NO: 292 - protein, 16 aa, Artificial Sequence
  Description of Artificial Sequence: Synthetic peptide
SIYYSGSTYYNPSLKS

SEQ ID NO: 293 - protein, 19 aa, Artificial Sequence
  Description of Artificial Sequence: Synthetic peptide
RIRSKADGGTSDYAAPVKG

SEQ ID NO: 294 - protein, 19 aa, Artificial Sequence
  Description of Artificial Sequence: Synthetic peptide
RSRNKARSYTTEYAASVKG

SEQ ID NO: 295 - protein, 16 aa, Artificial Sequence
  Description of Artificial Sequence: Synthetic peptide
SIYYSGSTYYNPSLKS

SEQ ID NO: 296 - protein, 16 aa, Artificial Sequence
  Description of Artificial Sequence: Synthetic peptide
SIYYSGSTYYNPSLKS

SEQ ID NO: 297 - protein, 16 aa, Artificial Sequence
  Description of Artificial Sequence: Synthetic peptide
HIDWEDEKFYSTSLKT

SEQ ID NO: 298 - protein, 17 aa, Artificial Sequence
  Description of Artificial Sequence: Synthetic peptide
VISGSGSATYYADSVKG

SEQ ID NO: 299 - protein, 16 aa, Artificial Sequence
  Description of Artificial Sequence: Synthetic peptide
EINHSGGTNYNPFLKS

SEQ ID NO: 300 - protein, 16 aa, Artificial Sequence
  Description of Artificial Sequence: Synthetic peptide
SISHGGNTYYTPSLKS

SEQ ID NO: 301 - protein, 16 aa, Artificial Sequence
  Description of Artificial Sequence: Synthetic peptide
YIYYSGSTNYNPSLKS

SEQ ID NO: 302 - protein, 17 aa, Artificial Sequence
  Description of Artificial Sequence: Synthetic peptide
VISFDQTTKYYADSVKG

SEQ ID NO: 303 - protein, 17 aa, Artificial Sequence
  Description of Artificial Sequence: Synthetic peptide
AISGSGGSTYYADSVKG

SEQ ID NO: 304 - protein, 17 aa, Artificial Sequence
  Description of Artificial Sequence: Synthetic peptide
VIWYDGSNKYCADSVKG

SEQ ID NO: 305 - protein, 16 aa, Artificial Sequence
  Description of Artificial Sequence: Synthetic peptide
YIYYSGSTNYNPSLKS

SEQ ID NO: 306 - protein, 17 aa, Artificial Sequence
  Description of Artificial Sequence: Synthetic peptide
GFDPEDGETIYAQKFQG

SEQ ID NO: 307 - protein, 16 aa, Artificial Sequence
  Description of Artificial Sequence: Synthetic peptide
SIYYSGSTYYNPSLKS

SEQ ID NO: 308 - protein, 17 aa, Artificial Sequence
  Description of Artificial Sequence: Synthetic peptide
AISGGGHFTYYADSVEG

SEQ ID NO: 309 - protein, 17 aa, Artificial Sequence
  Description of Artificial Sequence: Synthetic peptide
VISYEGSKKDYADSVKG

SEQ ID NO: 310 - protein, 17 aa, Artificial Sequence
  Description of Artificial Sequence: Synthetic peptide
SISSSSSYIYYADSVKG

SEQ ID NO: 311 - protein, 17 aa, Artificial Sequence
  Description of Artificial Sequence: Synthetic peptide
FMSYDGRNEYYADSVKG

SEQ ID NO: 312 - protein, 17 aa, Artificial Sequence
  Description of Artificial Sequence: Synthetic peptide
GINWNGGSTGYADSVKG

SEQ ID NO: 313 - protein, 17 aa, Artificial Sequence
  Description of Artificial Sequence: Synthetic peptide
TISSNGSNTYYAKSVKD

SEQ ID NO: 314 - protein, 16 aa, Artificial Sequence
  Description of Artificial Sequence: Synthetic peptide
HIFSNDEKSYSTSLKS

SEQ ID NO: 315 - protein, 17 aa, Artificial Sequence
  Description of Artificial Sequence: Synthetic peptide
AIWYDGSNENYADSVRG

SEQ ID NO: 316 - protein, 19 aa, Artificial Sequence
  Description of Artificial Sequence: Synthetic peptide
FIRSKTYGGTTEYAASVKG

SEQ ID NO: 317 - protein, 17 aa, Artificial Sequence
  Description of Artificial Sequence: Synthetic peptide
RITPIFGTTNYAQKFQG

SEQ ID NO: 318 - protein, 17 aa, Artificial Sequence
  Description of Artificial Sequence: Synthetic peptide
WITPYNSDTVYAQNFQG

SEQ ID NO: 319 - protein, 17 aa, Artificial Sequence
  Description of Artificial Sequence: Synthetic peptide
WMHPDSGNTVYAQNFQD

SEQ ID NO: 320 - protein, 17 aa, Artificial Sequence
  Description of Artificial Sequence: Synthetic peptide
AISGGGDGASYADSVKG

SEQ ID NO: 321 - protein, 16 aa, Artificial Sequence
  Description of Artificial Sequence: Synthetic peptide
SVYDSGRTEYNPSLKS

SEQ ID NO: 322 - protein, 17 aa, Artificial Sequence
  Description of Artificial Sequence: Synthetic peptide
WIHAGNGNTKDSEKFQG

SEQ ID NO: 323 - protein, 16 aa, Artificial Sequence
  Description of Artificial Sequence: Synthetic peptide
SIYYSGSTYYNPSLKS

SEQ ID NO: 324 - protein, 17 aa, Artificial Sequence
  Description of Artificial Sequence: Synthetic peptide
IIKPSGAGTIYAQKFQG

SEQ ID NO: 325 - protein, 17 aa, Artificial Sequence
  Description of Artificial Sequence: Synthetic peptide
IIYPADSDTRYSPSFQG

SEQ ID NO: 326 - protein, 17 aa, Artificial Sequence
  Description of Artificial Sequence: Synthetic peptide
WMNPNSGNTGYAQKFQG

SEQ ID NO: 327 - protein, 17 aa, Artificial Sequence
  Description of Artificial Sequence: Synthetic peptide
VLSGSSYIKYEADSVRG

SEQ ID NO: 328 - protein, 17 aa, Artificial Sequence
  Description of Artificial Sequence: Synthetic peptide
IINPSGGSTSYAQKFQG

SEQ ID NO: 329 - protein, 17 aa, Artificial Sequence
  Description of Artificial Sequence: Synthetic peptide
AIGGDGGATYYVDSIKG

SEQ ID NO: 330 - protein, 17 aa, Artificial Sequence
  Description of Artificial Sequence: Synthetic peptide
VISYDGSNKYYADSVKG

SEQ ID NO: 331 - protein, 17 aa, Artificial Sequence
  Description of Artificial Sequence: Synthetic peptide
GFDPEDAETIYAQKFQG

SEQ ID NO: 332 - protein, 16 aa, Artificial Sequence
  Description of Artificial Sequence: Synthetic peptide
RIDWDDDKYYSTSLKT

SEQ ID NO: 333 - protein, 16 aa, Artificial Sequence
  Description of Artificial Sequence: Synthetic peptide
RIDWDDDKYYSTSLKT

SEQ ID NO: 334 - protein, 17 aa, Artificial Sequence
  Description of Artificial Sequence: Synthetic peptide
VISYDGSNKYYADSVKG

SEQ ID NO: 335 - protein, 17 aa, Artificial Sequence
  Description of Artificial Sequence: Synthetic peptide
VIWYDGSNKYYADSVKG

SEQ ID NO: 336 - protein, 17 aa, Artificial Sequence
  Description of Artificial Sequence: Synthetic peptide
VISYDGSNKYYADSVKG

SEQ ID NO: 337 - protein, 17 aa, Artificial Sequence
  Description of Artificial Sequence: Synthetic peptide
GFDPEDGETIYAQKFQG

SEQ ID NO: 338 - protein, 16 aa, Artificial Sequence
  Description of Artificial Sequence: Synthetic peptide
LIYWDDDKRYSPSLKS

SEQ ID NO: 339 - protein, 16 aa, Artificial Sequence
  Description of Artificial Sequence: Synthetic peptide
EINHSGSTNYNPSLKS

SEQ ID NO: 340 - protein, 17 aa, Artificial Sequence
  Description of Artificial Sequence: Synthetic peptide
NIKQDGSEKYYVDSVKG

SEQ ID NO: 341 - protein, 16 aa, Artificial Sequence
  Description of Artificial Sequence: Synthetic peptide
YIYYSGSTNYNPSLKS

SEQ ID NO: 342 - protein, 16 aa, Artificial Sequence
  Description of Artificial Sequence: Synthetic peptide
RIDWDDDKFYSTSLKT

SEQ ID NO: 343 - protein, 19 aa, Artificial Sequence
  Description of Artificial Sequence: Synthetic peptide
RIKSKTDGGTTDYAAPVKG

SEQ ID NO: 344 - protein, 17 aa, Artificial Sequence
  Description of Artificial Sequence: Synthetic peptide
GIIPILGTANYAQKFQG

SEQ ID NO: 345 - protein, 17 aa, Artificial Sequence
  Description of Artificial Sequence: Synthetic peptide
YISSSGSTIYYADSVKG

SEQ ID NO: 346 - protein, 17 aa, Artificial Sequence
  Description of Artificial Sequence: Synthetic peptide
VISYDGSNKYYADSVKG

SEQ ID NO: 347 - protein, 16 aa, Artificial Sequence
  Description of Artificial Sequence: Synthetic peptide
EINHSGSTNYNPSLKS

SEQ ID NO: 348 - protein, 19 aa, Artificial Sequence
  Description of Artificial Sequence: Synthetic peptide
FIRSKAYGGTTEYAASVKG

SEQ ID NO: 349 - protein, 17 aa, Artificial Sequence
  Description of Artificial Sequence: Synthetic peptide
VISYDGSNKYYADSVKG

SEQ ID NO: 350 - protein, 17 aa, Artificial Sequence
  Description of Artificial Sequence: Synthetic peptide
VISYDGSNKYYADSVKG

SEQ ID NO: 351 - protein, 17 aa, Artificial Sequence
  Description of Artificial Sequence: Synthetic peptide
WASTKNDNTGYAQKFQG

SEQ ID NO: 352 - protein, 17 aa, Artificial Sequence
  Description of Artificial Sequence: Synthetic peptide
NIKQDGSEKYYVDSVKG

SEQ ID NO: 353 - protein, 17 aa, Artificial Sequence
  Description of Artificial Sequence: Synthetic peptide
VISYDGSNKYYADSVKG

SEQ ID NO: 354 - protein, 16 aa, Artificial Sequence
  Description of Artificial Sequence: Synthetic peptide
EINHSGSTNYNPSLKS

SEQ ID NO: 355 - protein, 17 aa, Artificial Sequence
  Description of Artificial Sequence: Synthetic peptide
NIKQDGSEKYYVDSVKG

SEQ ID NO: 356 - protein, 17 aa, Artificial Sequence
  Description of Artificial Sequence: Synthetic peptide
SISSSSSYIYYADSVKG

SEQ ID NO: 357 - protein, 17 aa, Artificial Sequence
  Description of Artificial Sequence: Synthetic peptide
AISGSGGSTYYADSVKG

SEQ ID NO: 358 - protein, 17 aa, Artificial Sequence
  Description of Artificial Sequence: Synthetic peptide
VISYDGSNKYYADSVKG

SEQ ID NO: 359 - protein, 17 aa, Artificial Sequence
  Description of Artificial Sequence: Synthetic peptide
LITYDATEKHFGDSVKG

SEQ ID NO: 360 - protein, 17 aa, Artificial Sequence
  Description of Artificial Sequence: Synthetic peptide
AISGSGGSTYYADSVKG

SEQ ID NO: 361 - protein, 16 aa, Artificial Sequence
  Description of Artificial Sequence: Synthetic peptide
YIYYSGSTYYNPSLKS

SEQ ID NO: 362 - protein, 16 aa, Artificial Sequence
  Description of Artificial Sequence: Synthetic peptide
EINHSGSTNYNPSLKS

SEQ ID NO: 363 - protein, 16 aa, Artificial Sequence
  Description of Artificial Sequence: Synthetic peptide
RIDWDDDKYYSTSLKT

SEQ ID NO: 364 - protein, 17 aa, Artificial Sequence
  Description of Artificial Sequence: Synthetic peptide
AIWYDGSNKYYADSVKG

SEQ ID NO: 365 - protein, 17 aa, Artificial Sequence
  Description of Artificial Sequence: Synthetic peptide
GIIPIFGTANYAQKFQG

SEQ ID NO: 366 - protein, 16 aa, Artificial Sequence
  Description of Artificial Sequence: Synthetic peptide
YIYYSGSTNYNPSLKS

SEQ ID NO: 367 - protein, 16 aa, Artificial Sequence
  Description of Artificial Sequence: Synthetic peptide
SIYYSGSTYYNPSLKS

SEQ ID NO: 368 - protein, 17 aa, Artificial Sequence
  Description of Artificial Sequence: Synthetic peptide
VISYDGSNKYYADSVKG

SEQ ID NO: 369 - protein, 19 aa, Artificial Sequence
  Description of Artificial Sequence: Synthetic peptide
RSKNRASSFATEYAASVKG

SEQ ID NO: 370 - protein, 17 aa, Artificial Sequence
  Description of Artificial Sequence: Synthetic peptide
VISYDGSNKYYADSVKG

SEQ ID NO: 371 - protein, 16 aa, Artificial Sequence
  Description of Artificial Sequence: Synthetic peptide
SIYYSGSTYYNPSLKS

SEQ ID NO: 372 - protein, 17 aa, Artificial Sequence
  Description of Artificial Sequence: Synthetic peptide
SSSGTGATTNYADSVNG

SEQ ID NO: 373 - protein, 16 aa, Artificial Sequence
  Description of Artificial Sequence: Synthetic peptide
EINHAGSLSYNPSLKS

SEQ ID NO: 374 - protein, 16 aa, Artificial Sequence
  Description of Artificial Sequence: Synthetic peptide
EVYRSGTRQYSPSLES

SEQ ID NO: 375 - protein, 16 aa, Artificial Sequence
  Description of Artificial Sequence: Synthetic peptide
ESDESGKTDYNPSLKS

SEQ ID NO: 376 - protein, 17 aa, Artificial Sequence
  Description of Artificial Sequence: Synthetic peptide
RTNEDGTITNYADSVKG

SEQ ID NO: 377 - protein, 17 aa, Artificial Sequence
  Description of Artificial Sequence: Synthetic peptide
RISPVLNTTYYAQKLEG

SEQ ID NO: 378 - protein, 17 aa, Artificial Sequence
  Description of Artificial Sequence: Synthetic peptide
RINPNSGGTHYAQKFQG

SEQ ID NO: 379 - protein, 17 aa, Artificial Sequence
  Description of Artificial Sequence: Synthetic peptide
MIYSDSSEKHYADSVKG

SEQ ID NO: 380 - protein, 17 aa, Artificial Sequence
  Description of Artificial Sequence: Synthetic peptide
IISYSGDTEYDAGSVRG

SEQ ID NO: 381 - protein, 16 aa, Artificial Sequence
  Description of Artificial Sequence: Synthetic peptide
EIIHRGRTNSNPSLKS

SEQ ID NO: 382 - protein, 16 aa, Artificial Sequence
  Description of Artificial Sequence: Synthetic peptide
EVIPHGSTKCDPSLKS

SEQ ID NO: 383 - protein, 16 aa, Artificial Sequence
  Description of Artificial Sequence: Synthetic peptide
EIDRSGTTNYSPSLKS

SEQ ID NO: 384 - protein, 16 aa, Artificial Sequence
  Description of Artificial Sequence: Synthetic peptide
EITHSGRTNYNPSLTR

SEQ ID NO: 385 - protein, 16 aa, Artificial Sequence
  Description of Artificial Sequence: Synthetic peptide
EINYRGNTKYNPSLRS

SEQ ID NO: 386 - protein, 17 aa, Artificial Sequence
  Description of Artificial Sequence: Synthetic peptide
GSVPEDDNTIYAEKFRG

SEQ ID NO: 387 - protein, 17 aa, Artificial Sequence
  Description of Artificial Sequence: Synthetic peptide
GISWNSGSIDYADSVKG

SEQ ID NO: 388 - protein, 18 aa, Artificial Sequence
  Description of Artificial Sequence: Synthetic peptide
TISDTDGSTIYYTDSVKG

SEQ ID NO: 389 - protein, 17 aa, Artificial Sequence
  Description of Artificial Sequence: Synthetic peptide
GIIAIFGTADYAQRFQG

SEQ ID NO: 390 - protein, 17 aa, Artificial Sequence
  Description of Artificial Sequence: Synthetic peptide
WMNPYSGNTGFSQKFQG

SEQ ID NO: 391 - protein, 17 aa, Artificial Sequence
  Description of Artificial Sequence: Synthetic peptide
RIIPMVGVADYAQKLQG

SEQ ID NO: 392 - protein, 16 aa, Artificial Sequence
  Description of Artificial Sequence: Synthetic peptide
YIYDSGSSKYNPSLKS

SEQ ID NO: 393 - protein, 17 aa, Artificial Sequence
  Description of Artificial Sequence: Synthetic peptide
IIYPGDSDTRYSPSFQG

SEQ ID NO: 394 - protein, 17 aa, Artificial Sequence
  Description of Artificial Sequence: Synthetic peptide
VISHDGTNEYYGDSVKG

SEQ ID NO: 395 - protein, 17 aa, Artificial Sequence
  Description of Artificial Sequence: Synthetic peptide
SISSSSSHIYYADSVKG

SEQ ID NO: 396 - protein, 17 aa, Artificial Sequence
  Description of Artificial Sequence: Synthetic peptide
WINPDTSATNYAQNFQG

SEQ ID NO: 397 - protein, 17 aa, Artificial Sequence
  Description of Artificial Sequence: Synthetic peptide
EIIPVFGAPKFAQKFRG

SEQ ID NO: 398 - protein, 17 aa, Artificial Sequence
  Description of Artificial Sequence: Synthetic peptide
WLNGGNGNTKYSQKFQA

SEQ ID NO: 399 - protein, 17 aa, Artificial Sequence
  Description of Artificial Sequence: Synthetic peptide
LISWDGGSKYYADSVMG

SEQ ID NO: 400 - protein, 16 aa, Artificial Sequence
  Description of Artificial Sequence: Synthetic peptide
CISYSGRTYDNPSLKS

SEQ ID NO: 401 - protein, 17 aa, Artificial Sequence
  Description of Artificial Sequence: Synthetic peptide
LINPSGSGTAYPQHFQG

SEQ ID NO: 402 - protein, 17 aa, Artificial Sequence
  Description of Artificial Sequence: Synthetic peptide
TVLPIFDTTHSAQKFQG

SEQ ID NO: 403 - protein, 17 aa, Artificial Sequence
  Description of Artificial Sequence: Synthetic peptide
GIIPVFGATNYAQKFRG

SEQ ID NO: 404 - protein, 16 aa, Artificial Sequence
  Description of Artificial Sequence: Synthetic peptide
HIFSNDAKSYSTSLKG

SEQ ID NO: 405 - protein, 17 aa, Artificial Sequence
  Description of Artificial Sequence: Synthetic peptide
GIIPVFGAPNYAQKFQG

SEQ ID NO: 406 - protein, 17 aa, Artificial Sequence
  Description of Artificial Sequence: Synthetic peptide
IIYPGDSDTRYSLAFQG

SEQ ID NO: 407 - protein, 17 aa, Artificial Sequence
  Description of Artificial Sequence: Synthetic peptide
SISGSGGSPYYADSVKG

SEQ ID NO: 408 - protein, 17 aa, Artificial Sequence
  Description of Artificial Sequence: Synthetic peptide
LINGGGGRTYYTDSVKG

SEQ ID NO: 409 - protein, 17 aa, Artificial Sequence
  Description of Artificial Sequence: Synthetic peptide
GISWNGANIGYADSVKG

SEQ ID NO: 410 - protein, 17 aa, Artificial Sequence
  Description of Artificial Sequence: Synthetic peptide
GFDPEDGETIYAQNFQG

SEQ ID NO: 411 - protein, 17 aa, Artificial Sequence
  Description of Artificial Sequence: Synthetic peptide
WINAGNGNTKYSQKFQG

SEQ ID NO: 412 - protein, 19 aa, Artificial Sequence
  Description of Artificial Sequence: Synthetic peptide
FIRSKVYGETTEYAASVKG

SEQ ID NO: 413 - protein, 16 aa, Artificial Sequence
  Description of Artificial Sequence: Synthetic peptide
SIFYSGTTHYNPSLKS

SEQ ID NO: 414 - protein, 17 aa, Artificial Sequence
  Description of Artificial Sequence: Synthetic peptide
FIRYDGSNEYYADSVKG

SEQ ID NO: 415 - protein, 17 aa, Artificial Sequence
  Description of Artificial Sequence: Synthetic peptide
FIRYDGSNKYYADSVKG

SEQ ID NO: 416 - protein, 16 aa, Artificial Sequence
  Description of Artificial Sequence: Synthetic peptide
YIHYSGSTIYNPSLKS

SEQ ID NO: 417 - protein, 16 aa, Artificial Sequence
  Description of Artificial Sequence: Synthetic peptide
SIYYSGSTYYNPSLKS

SEQ ID NO: 418 - protein, 16 aa, Artificial Sequence
  Description of Artificial Sequence: Synthetic peptide
YIYYSGSTYYNPSLKS

SEQ ID NO: 419 - protein, 17 aa, Artificial Sequence
  Description of Artificial Sequence: Synthetic peptide
WINAGNGNTKYSQKFQG

SEQ ID NO: 420 - protein, 16 aa, Artificial Sequence
  Description of Artificial Sequence: Synthetic peptide
YIYYSGSTNYNPSLKS

SEQ ID NO: 421 - protein, 16 aa, Artificial Sequence
  Description of Artificial Sequence: Synthetic peptide
IIYYSGSTYYNPSLKS

SEQ ID NO: 422 - protein, 16 aa, Artificial Sequence
  Description of Artificial Sequence: Synthetic peptide
YIYYSGSTYYNPSLKS

SEQ ID NO: 423 - protein, 17 aa, Artificial Sequence
  Description of Artificial Sequence: Synthetic peptide
AISGSGGSTYYADSVKG

SEQ ID NO: 424 - protein, 16 aa, Artificial Sequence
  Description of Artificial Sequence: Synthetic peptide
SIYYSGSTYYNPSLKS

SEQ ID NO: 425 - protein, 17 aa, Artificial Sequence
  Description of Artificial Sequence: Synthetic peptide
GFDPEDGETIYAQKFQA

SEQ ID NO: 426 - protein, 17 aa, Artificial Sequence
  Description of Artificial Sequence: Synthetic peptide
GIIPIFGTANYAQKFQG

SEQ ID NO: 427 - protein, 17 aa, Artificial Sequence
  Description of Artificial Sequence: Synthetic peptide
IIYPGDSDTRYSPSFQG

SEQ ID NO: 428 - protein, 17 aa, Artificial Sequence
  Description of Artificial Sequence: Synthetic peptide
AISGSGGSTYYADSVKG

SEQ ID NO: 429 - protein, 17 aa, Artificial Sequence
  Description of Artificial Sequence: Synthetic peptide
YISRSGSTIYYVDSVKG

SEQ ID NO: 430 - protein, 16 aa, Artificial Sequence
  Description of Artificial Sequence: Synthetic peptide
EINHSGSTNYNPSLKS

SEQ ID NO: 431 - protein, 16 aa, Artificial Sequence
  Description of Artificial Sequence: Synthetic peptide
YIYYSGSTNYNPSLKS

SEQ ID NO: 432 - protein, 17 aa, Artificial Sequence
  Description of Artificial Sequence: Synthetic peptide
YISSSGNTIYYADSVKG

SEQ ID NO: 433 - protein, 16 aa, Artificial Sequence
  Description of Artificial Sequence: Synthetic peptide
SIYYSGSTYYNPSLKS

SEQ ID NO: 434 - protein, 17 aa, Artificial Sequence
  Description of Artificial Sequence: Synthetic peptide
IIYPGDSDTRYSPSFQG

SEQ ID NO: 435 - protein, 16 aa, Artificial Sequence
  Description of Artificial Sequence: Synthetic peptide
SIYYSGSTYYNPSLKS

SEQ ID NO: 436 - protein, 17 aa, Artificial Sequence
  Description of Artificial Sequence: Synthetic peptide
NIKQDGSEKYYVDSVKG

SEQ ID NO: 437 - protein, 17 aa, Artificial Sequence
  Description of Artificial Sequence: Synthetic peptide
SISSSSSYIYYADSVKG

SEQ ID NO: 438 - protein, 17 aa, Artificial Sequence
  Description of Artificial Sequence: Synthetic peptide
RINSDGSSTSYADSVKG

SEQ ID NO: 439 - protein, 16 aa, Artificial Sequence
  Description of Artificial Sequence: Synthetic peptide
SIYYSGSTYYNPSLKS

SEQ ID NO: 440 - protein, 17 aa, Artificial Sequence
  Description of Artificial Sequence: Synthetic peptide
RINPNSGGTNYAQKFQG

SEQ ID NO: 441 - protein, 16 aa, Artificial Sequence
  Description of Artificial Sequence: Synthetic peptide
SIYYSGSTYYNPSLKS

SEQ ID NO: 442 - protein, 16 aa, Artificial Sequence
  Description of Artificial Sequence: Synthetic peptide
SIYYSGSTYYNPSLKS

SEQ ID NO: 443 - protein, 16 aa, Artificial Sequence
  Description of Artificial Sequence: Synthetic peptide
YIYYSGSTYYNPSLKS

SEQ ID NO: 444 - protein, 17 aa, Artificial Sequence
  Description of Artificial Sequence: Synthetic peptide
SISSSSSYIYYADSVKG

SEQ ID NO: 445 - protein, 16 aa, Artificial Sequence
  Description of Artificial Sequence: Synthetic peptide
SIYYSGSTYYNPSLKS

SEQ ID NO: 446 - protein, 19 aa, Artificial Sequence
  Description of Artificial Sequence: Synthetic peptide
RIKTKSDGGTTDYAAPVKG

SEQ ID NO: 447 - protein, 16 aa, Artificial Sequence
  Description of Artificial Sequence: Synthetic peptide
YIYYSGSTYYNPSLKS

SEQ ID NO: 448 - protein, 19 aa, Artificial Sequence
  Description of Artificial Sequence: Synthetic peptide
RIKSKTDGGTTDYAAPVKG

SEQ ID NO: 449 - protein, 16 aa, Artificial Sequence
  Description of Artificial Sequence: Synthetic peptide
RIYTSGSTNYNPSLKS

SEQ ID NO: 450 - protein, 16 aa, Artificial Sequence
  Description of Artificial Sequence: Synthetic peptide
YIYYSGSTNYNPSLRS

SEQ ID NO: 451 - protein, 16 aa, Artificial Sequence
  Description of Artificial Sequence: Synthetic peptide
SIYYSGSTYYNPSLKS

SEQ ID NO: 452 - protein, 16 aa, Artificial Sequence
  Description of Artificial Sequence: Synthetic peptide
YIYYSGSTNYNPSLKS

SEQ ID NO: 453 - protein, 16 aa, Artificial Sequence
  Description of Artificial Sequence: Synthetic peptide
EINHSGSTNYNPSLKS

SEQ ID NO: 454 - protein, 16 aa, Artificial Sequence
  Description of Artificial Sequence: Synthetic peptide
SIYYSGSTYYNPSLKS

SEQ ID NO: 455 - protein, 16 aa, Artificial Sequence
  Description of Artificial Sequence: Synthetic peptide
YIYYSGSTNYNPSLKS

SEQ ID NO: 456 - protein, 17 aa, Artificial Sequence
  Description of Artificial Sequence: Synthetic peptide
AISGSGGSTYYADSVKG

SEQ ID NO: 457 - protein, 17 aa, Artificial Sequence
  Description of Artificial Sequence: Synthetic peptide
AISGSGGSTYYADSVKG

SEQ ID NO: 458 - protein, 16 aa, Artificial Sequence
  Description of Artificial Sequence: Synthetic peptide
SIYYSGSTYYNPSLKS

SEQ ID NO: 459 - protein, 16 aa, Artificial Sequence
  Description of Artificial Sequence: Synthetic peptide
YIYYSGSTNYNPSLKS

SEQ ID NO: 460 - protein, 17 aa, Artificial Sequence
  Description of Artificial Sequence: Synthetic peptide
WISAYNGNTNYAQKLQG

SEQ ID NO: 461 - protein, 17 aa, Artificial Sequence
  Description of Artificial Sequence: Synthetic peptide
GFDPEDGETIYAQKFQG

SEQ ID NO: 462 - protein, 17 aa, Artificial Sequence
  Description of Artificial Sequence: Synthetic peptide
WMNPNSGNTGYAQKFQG

SEQ ID NO: 463 - protein, 16 aa, Artificial Sequence
  Description of Artificial Sequence: Synthetic peptide
SIYYSGSTYYNPSLKS

SEQ ID NO: 464 - protein, 16 aa, Artificial Sequence
  Description of Artificial Sequence: Synthetic peptide
SIYYSGSTYYNPSLKS

SEQ ID NO: 465 - protein, 17 aa, Artificial Sequence
  Description of Artificial Sequence: Synthetic peptide
IINPSGGSTSYAQKFQG

SEQ ID NO: 466 - protein, 17 aa, Artificial Sequence
  Description of Artificial Sequence: Synthetic peptide
WMNPNSGNTGYAQKFQG

SEQ ID NO: 467 - protein, 17 aa, Artificial Sequence
  Description of Artificial Sequence: Synthetic peptide
SISSSSSYIYYADSVKG

SEQ ID NO: 468 - protein, 17 aa, Artificial Sequence
  Description of Artificial Sequence: Synthetic peptide
NIKQDGSEKYYVDSVKG

SEQ ID NO: 469 - protein, 16 aa, Artificial Sequence
  Description of Artificial Sequence: Synthetic peptide
SIYYSGSTYYNPSLKS

SEQ ID NO: 470 - protein, 16 aa, Artificial Sequence
  Description of Artificial Sequence: Synthetic peptide
VIYSGGSTYYADSVKG

SEQ ID NO: 471 - protein, 23 aa, Artificial Sequence
  Description of Artificial Sequence: Synthetic peptide
AREGDCSGGSCYSGYYYYYGMDV

SEQ ID NO: 472 - protein, 16 aa, Artificial Sequence
  Description of Artificial Sequence: Synthetic peptide
AVNYCSSTSCYDAFDI

SEQ ID NO: 473 - protein, 19 aa, Artificial Sequence
  Description of Artificial Sequence: Synthetic peptide
ATAPPYCSSTSCPINWFDP

SEQ ID NO: 474 - protein, 15 aa, Artificial Sequence
  Description of Artificial Sequence: Synthetic peptide
ARVGVYDSSGYYFDY

SEQ ID NO: 475 - protein, 12 aa, Artificial Sequence
  Description of Artificial Sequence: Synthetic peptide
ARSYSSSLPFDY

SEQ ID NO: 476 - protein, 17 aa, Artificial Sequence
  Description of Artificial Sequence: Synthetic peptide
ARSNYDILTGRLDAFDI

SEQ ID NO: 477 - protein, 16 aa, Artificial Sequence
  Description of Artificial Sequence: Synthetic peptide
AKDRNYDFWSGYYFDY

SEQ ID NO: 478 - protein, 10 aa, Artificial Sequence
  Description of Artificial Sequence: Synthetic peptide
ARDGGGLLLN

SEQ ID NO: 479 - protein, 11 aa, Artificial Sequence
  Description of Artificial Sequence: Synthetic peptide
ARDGSSWYIDY

SEQ ID NO: 480 - protein, 14 aa, Artificial Sequence
  Description of Artificial Sequence: Synthetic peptide
ARPRGGSYYSAFDI

SEQ ID NO: 481 - protein, 15 aa, Artificial Sequence
  Description of Artificial Sequence: Synthetic peptide
AKSRGGGYYYYYMDV

SEQ ID NO: 482 - protein, 11 aa, Artificial Sequence
  Description of Artificial Sequence: Synthetic peptide
ARDLYYYGMDV

SEQ ID NO: 483 - protein, 13 aa, Artificial Sequence
  Description of Artificial Sequence: Synthetic peptide
ARILPLNWYYFDY

SEQ ID NO: 484 - protein, 14 aa, Artificial Sequence
  Description of Artificial Sequence: Synthetic peptide
ATSSFDYYYYFMDV

SEQ ID NO: 485 - protein, 16 aa, Artificial Sequence
  Description of Artificial Sequence: Synthetic peptide
ARAPTIFGVVIGWFDP

SEQ ID NO: 486 - protein, 17 aa, Artificial Sequence
  Description of Artificial Sequence: Synthetic peptide
ARAPRITIFGVVSPFDY

SEQ ID NO: 487 - protein, 21 aa, Artificial Sequence
  Description of Artificial Sequence: Synthetic peptide
AREGRFLEWLLSVNYYYYMDV

SEQ ID NO: 488 - protein, 16 aa, Artificial Sequence
  Description of Artificial Sequence: Synthetic peptide
ARTRITIFGGERYFDL

SEQ ID NO: 489 - protein, 6 aa, Artificial Sequence
  Description of Artificial Sequence: Synthetic peptide
ARGFDY

SEQ ID NO: 490 - protein, 14 aa, Artificial Sequence
  Description of Artificial Sequence: Synthetic peptide
ARRGFGLTYYGMDV

SEQ ID NO: 491 - protein, 13 aa, Artificial Sequence
  Description of Artificial Sequence: Synthetic peptide
ASSHSRGYYAFDY

SEQ ID NO: 492 - protein, 17 aa, Artificial Sequence
  Description of Artificial Sequence: Synthetic peptide
AKVPSYIYDSRDDYLDF

SEQ ID NO: 493 - protein, 14 aa, Artificial Sequence
  Description of Artificial Sequence: Synthetic peptide
ASSHSADYLGPFDY

SEQ ID NO: 494 - protein, 16 aa, Artificial Sequence
  Description of Artificial Sequence: Synthetic peptide
AKRREVLHLWRDEMDV

SEQ ID NO: 495 - protein, 11 aa, Artificial Sequence
  Description of Artificial Sequence: Synthetic peptide
VKYLQSGDEGY

SEQ ID NO: 496 - protein, 12 aa, Artificial Sequence
  Description of Artificial Sequence: Synthetic peptide
ARDPASGWGLDP

SEQ ID NO: 497 - protein, 19 aa, Artificial Sequence
  Description of Artificial Sequence: Synthetic peptide
ARAAKRITIFGTRGYYFDY

SEQ ID NO: 498 - protein, 14 aa, Artificial Sequence
  Description of Artificial Sequence: Synthetic peptide
ARDSSSWPYVSLGY

SEQ ID NO: 499 - protein, 17 aa, Artificial Sequence
  Description of Artificial Sequence: Synthetic peptide
ARIPRGWLQSPSYYFDY

SEQ ID NO: 500 - protein, 11 aa, Artificial Sequence
  Description of Artificial Sequence: Synthetic peptide
ARGGGPTDRDY

SEQ ID NO: 501 - protein, 17 aa, Artificial Sequence
  Description of Artificial Sequence: Synthetic peptide
ARVVWQLVENYYYYMDV

SEQ ID NO: 502 - protein, 19 aa, Artificial Sequence
  Description of Artificial Sequence: Synthetic peptide
ARRLGYDNGWGTYFYGLDV

SEQ ID NO: 503 - protein, 17 aa, Artificial Sequence
  Description of Artificial Sequence: Synthetic peptide
ARRSRAVAGKYYWYYDL

SEQ ID NO: 504 - protein, 14 aa, Artificial Sequence
  Description of Artificial Sequence: Synthetic peptide
ARLRAVGGDDTFDV

SEQ ID NO: 505 - protein, 15 aa, Artificial Sequence
  Description of Artificial Sequence: Synthetic peptide
AKYWSLSGPTELLDS

SEQ ID NO: 506 - protein, 10 aa, Artificial Sequence
  Description of Artificial Sequence: Synthetic peptide
AQYVQEGMDV

SEQ ID NO: 507 - protein, 16 aa, Artificial Sequence
  Description of Artificial Sequence: Synthetic peptide
ARGGRVGATYPYNMDV

SEQ ID NO: 508 - protein, 17 aa, Artificial Sequence
  Description of Artificial Sequence: Synthetic peptide
ARDRRLYGDFYYYGMDV

SEQ ID NO: 509 - protein, 22 aa, Artificial Sequence
  Description of Artificial Sequence: Synthetic peptide
ARGVDGISTIVVLVFWNWYFDL

SEQ ID NO: 510 - protein, 18 aa, Artificial Sequence
  Description of Artificial Sequence: Synthetic peptide
ARSGRGWLQLNPSYYFDY

SEQ ID NO: 511 - protein, 13 aa, Artificial Sequence
  Description of Artificial Sequence: Synthetic peptide
AKGYPRYYYGMDV

SEQ ID NO: 512 - protein, 19 aa, Artificial Sequence
  Description of Artificial Sequence: Synthetic peptide
ARRRAATWSIYYYYYYMDV

SEQ ID NO: 513 - protein, 14 aa, Artificial Sequence
  Description of Artificial Sequence: Synthetic peptide
ARSTYLPAAGTMNF

SEQ ID NO: 514 - protein, 24 aa, Artificial Sequence
  Description of Artificial Sequence: Synthetic peptide
ARGNIVVVPAAMGVFLYYYYSMDV

SEQ ID NO: 515 - protein, 18 aa, Artificial Sequence
  Description of Artificial Sequence: Synthetic peptide
ARGERQWLQLYSYYGMDV

SEQ ID NO: 516 - protein, 18 aa, Artificial Sequence
  Description of Artificial Sequence: Synthetic peptide
ARDVRMITFGGVIVYFDY

SEQ ID NO: 517 - protein, 6 aa, Artificial Sequence
  Description of Artificial Sequence: Synthetic peptide
ARPWGY

SEQ ID NO: 518 - protein, 19 aa, Artificial Sequence
  Description of Artificial Sequence: Synthetic peptide
ARGMKVVTIFGRREYYFDY

SEQ ID NO: 519 - protein, 16 aa, Artificial Sequence
  Description of Artificial Sequence: Synthetic peptide
ARRPSLGFGSSWNFDL

SEQ ID NO: 520 - protein, 6 aa, Artificial Sequence
  Description of Artificial Sequence: Synthetic peptide
VRDAGG

SEQ ID NO: 521 - protein, 15 aa, Artificial Sequence
  Description of Artificial Sequence: Synthetic peptide
ANTDIGDVRFYGMDV

SEQ ID NO: 522 - protein, 21 aa, Artificial Sequence
  Description of Artificial Sequence: Synthetic peptide
ARIRGERITIFAVLVTGAFDV

SEQ ID NO: 523 - protein, 12 aa, Artificial Sequence
  Description of Artificial Sequence: Synthetic peptide
ARRLEPRHYFDT

SEQ ID NO: 524 - protein, 15 aa, Artificial Sequence
  Description of Artificial Sequence: Synthetic peptide
ATDDVSLVVIYALAI

SEQ ID NO: 525 - protein, 10 aa, Artificial Sequence
  Description of Artificial Sequence: Synthetic peptide
AKHLIRAYDY

SEQ ID NO: 526 - protein, 16 aa, Artificial Sequence
  Description of Artificial Sequence: Synthetic peptide
AKAGGIFAIHYYGMNV

SEQ ID NO: 527 - protein, 18 aa, Artificial Sequence
  Description of Artificial Sequence: Synthetic peptide
ARDGAPLYDILTHDAFDI

SEQ ID NO: 528 - protein, 14 aa, Artificial Sequence
  Description of Artificial Sequence: Synthetic peptide
ATSHSFYYDGPFDY

SEQ ID NO: 529 - protein, 14 aa, Artificial Sequence
  Description of Artificial Sequence: Synthetic peptide
TRDGGEGGYTAFDI

SEQ ID NO: 530 - protein, 16 aa, Artificial Sequence
  Description of Artificial Sequence: Synthetic peptide
ARHKMGWLQFAGWFDP

SEQ ID NO: 531 - protein, 22 aa, Artificial Sequence
  Description of Artificial Sequence: Synthetic peptide
ARHAMSGITIFGVVTNNNWFDP

SEQ ID NO: 532 - protein, 12 aa, Artificial Sequence
  Description of Artificial Sequence: Synthetic peptide
ARNEWDFDAFDI

SEQ ID NO: 533 - protein, 18 aa, Artificial Sequence
  Description of Artificial Sequence: Synthetic peptide
AKVRAGSGSHKAGYYFEK

SEQ ID NO: 534 - protein, 21 aa, Artificial Sequence
  Description of Artificial Sequence: Synthetic peptide
VRDSDMTLAAYYKGFQYGMDV

SEQ ID NO: 535 - protein, 20 aa, Artificial Sequence
  Description of Artificial Sequence: Synthetic peptide
ARAYCSGGSCYVYYYFYVDV

SEQ ID NO: 536 - protein, 18 aa, Artificial Sequence
  Description of Artificial Sequence: Synthetic peptide
ARVRREWLAAYFYYGMDV

SEQ ID NO: 537 - protein, 22 aa, Artificial Sequence
  Description of Artificial Sequence: Synthetic peptide
ARQEDYDYVWGIFRPRGWYIDL

SEQ ID NO: 538 - protein, 20 aa, Artificial Sequence
  Description of Artificial Sequence: Synthetic peptide
AKTTGVTMIVVVIEGGYFDY

SEQ ID NO: 539 - protein, 26 aa, Artificial Sequence
  Description of Artificial Sequence: Synthetic peptide
AREAKPAGGRSFTIFGVATYYYYMDV

SEQ ID NO: 540 - protein, 17 aa, Artificial Sequence
  Description of Artificial Sequence: Synthetic peptide
ARAPRGWLQLSPYYFDL

SEQ ID NO: 541 - protein, 16 aa, Artificial Sequence
  Description of Artificial Sequence: Synthetic peptide
ATAFAYCGGDCYYPSY

SEQ ID NO: 542 - protein, 21 aa, Artificial Sequence
  Description of Artificial Sequence: Synthetic peptide
ARQMPNRPMIVVVTIRGWFDP

SEQ ID NO: 543 - protein, 15 aa, Artificial Sequence
  Description of Artificial Sequence: Synthetic peptide
AKDPRLVTTGWYYDL

SEQ ID NO: 544 - protein, 17 aa, Artificial Sequence
  Description of Artificial Sequence: Synthetic peptide
AKDAAIFMIYPSRYFDL

SEQ ID NO: 545 - protein, 16 aa, Artificial Sequence
  Description of Artificial Sequence: Synthetic peptide
ARGWYQLLLPYYYMDV

SEQ ID NO: 546 - protein, 13 aa, Artificial Sequence
  Description of Artificial Sequence: Synthetic peptide
ARVPGGVLGTFDI

SEQ ID NO: 547 - protein, 18 aa, Artificial Sequence
  Description of Artificial Sequence: Synthetic peptide
ARWPLLGISGYYHYYMDV

SEQ ID NO: 548 - protein, 16 aa, Artificial Sequence
  Description of Artificial Sequence: Synthetic peptide
ARSPGLAIHSSTSLDV

SEQ ID NO: 549 - protein, 16 aa, Artificial Sequence
  Description of Artificial Sequence: Synthetic peptide
ARIRAQWLTFYYYMDV

SEQ ID NO: 550 - protein, 14 aa, Artificial Sequence
  Description of Artificial Sequence: Synthetic peptide
ARNHIPGSSLGFDP

SEQ ID NO: 551 - protein, 22 aa, Artificial Sequence
  Description of Artificial Sequence: Synthetic peptide
TKDGRYDWNFILDSYYYYYMDV

SEQ ID NO: 552 - protein, 12 aa, Artificial Sequence
  Description of Artificial Sequence: Synthetic peptide
ARGASGWFGMDV

SEQ ID NO: 553 - protein, 11 aa, Artificial Sequence
  Description of Artificial Sequence: Synthetic peptide
ARDPWRDCSSC

SEQ ID NO: 554 - protein, 19 aa, Artificial Sequence
  Description of Artificial Sequence: Synthetic peptide
ARGPRLVRFLQWSLNYMDV

SEQ ID NO: 555 - protein, 5 aa, Artificial Sequence
  Description of Artificial Sequence: Synthetic peptide
AKIAD

SEQ ID NO: 556 - protein, 20 aa, Artificial Sequence
  Description of Artificial Sequence: Synthetic peptide
ARHAGPHMVRGVMRNNWFDP

SEQ ID NO: 557 - protein, 10 aa, Artificial Sequence
  Description of Artificial Sequence: Synthetic peptide
AIAAAGTQVV

SEQ ID NO: 558 - protein, 22 aa, Artificial Sequence
  Description of Artificial Sequence: Synthetic peptide
ARHPLSSITIFGVVKREYYFDY

SEQ ID NO: 559 - protein, 11 aa, Artificial Sequence
  Description of Artificial Sequence: Synthetic peptide
ARGGGVTDRDY

SEQ ID NO: 560 - protein, 18 aa, Artificial Sequence
  Description of Artificial Sequence: Synthetic peptide
ARSFEYCTGTTCQSWFDF

SEQ ID NO: 561 - protein, 18 aa, Artificial Sequence
  Description of Artificial Sequence: Synthetic peptide
ARGRAYQLLFNYYYYMDV

SEQ ID NO: 562 - protein, 14 aa, Artificial Sequence
  Description of Artificial Sequence: Synthetic peptide
ARKGVGSQDYGLDV

SEQ ID NO: 563 - protein, 18 aa, Artificial Sequence
  Description of Artificial Sequence: Synthetic peptide
ARDPTTVTTYDYYYGMDV

SEQ ID NO: 564 - protein, 9 aa, Artificial Sequence
  Description of Artificial Sequence: Synthetic peptide
ATPSPTRYS

SEQ ID NO: 565 - protein, 16 aa, Artificial Sequence
  Description of Artificial Sequence: Synthetic peptide
ARDPDYYDSSSDAFDI

SEQ ID NO: 566 - protein, 21 aa, Artificial Sequence
  Description of Artificial Sequence: Synthetic peptide
ATALAVTGTSDSYYYYYGMDV

SEQ ID NO: 567 - protein, 12 aa, Artificial Sequence
  Description of Artificial Sequence: Synthetic peptide
AREGVATISLDY

SEQ ID NO: 568 - protein, 12 aa, Artificial Sequence
  Description of Artificial Sequence: Synthetic peptide
ARTQANRVAFDI

SEQ ID NO: 569 - protein, 27 aa, Artificial Sequence
  Description of Artificial Sequence: Synthetic peptide
AKDQKYYDILTGYYRSTYYYYYYGMDV

SEQ ID NO: 570 - protein, 20 aa, Artificial Sequence
  Description of Artificial Sequence: Synthetic peptide
AKVGSPYCSGGSCYSGYFDY

SEQ ID NO: 571 - protein, 16 aa, Artificial Sequence
  Description of Artificial Sequence: Synthetic peptide
AKSPEGAAAGTGYFDY

SEQ ID NO: 572 - protein, 14 aa, Artificial Sequence
  Description of Artificial Sequence: Synthetic peptide
ATGPAAATSGWFDP

SEQ ID NO: 573 - protein, 11 aa, Artificial Sequence
  Description of Artificial Sequence: Synthetic peptide
AHHEVATVFDY

SEQ ID NO: 574 - protein, 23 aa, Artificial Sequence
  Description of Artificial Sequence: Synthetic peptide
ARGTGIAVAGVLVNFYYCYYMDV

SEQ ID NO: 575 - protein, 12 aa, Artificial Sequence
  Description of Artificial Sequence: Synthetic peptide
ARLSGGSWYFDY

SEQ ID NO: 576 - protein, 6 aa, Artificial Sequence
  Description of Artificial Sequence: Synthetic peptide
ARGFDY

SEQ ID NO: 577 - protein, 10 aa, Artificial Sequence
  Description of Artificial Sequence: Synthetic peptide
ARYYYYGMDV

SEQ ID NO: 578 - protein, 19 aa, Artificial Sequence
  Description of Artificial Sequence: Synthetic peptide
TTGRYYYDSSGYANDAFDI

SEQ ID NO: 579 - protein, 15 aa, Artificial Sequence
  Description of Artificial Sequence: Synthetic peptide
AREGGFYGSGRNFDY

SEQ ID NO: 580 - protein, 22 aa, Artificial Sequence
  Description of Artificial Sequence: Synthetic peptide
ARDSTRYCSSTSCSSYYYGMDV

SEQ ID NO: 581 - protein, 14 aa, Artificial Sequence
  Description of Artificial Sequence: Synthetic peptide
ARDSDDYGDYYFDY

SEQ ID NO: 582 - protein, 21 aa, Artificial Sequence
  Description of Artificial Sequence: Synthetic peptide
AREGRFLEWLLGVNYYYYMDV

SEQ ID NO: 583 - protein, 12 aa, Artificial Sequence
  Description of Artificial Sequence: Synthetic peptide
TREDFWSGYSDY

SEQ ID NO: 584 - protein, 19 aa, Artificial Sequence
  Description of Artificial Sequence: Synthetic peptide
AKDPGITIFGVVYYYYMDV

SEQ ID NO: 585 - protein, 17 aa, Artificial Sequence
  Description of Artificial Sequence: Synthetic peptide
ARACSSTSCYKGDAFDI

SEQ ID NO: 586 - protein, 10 aa, Artificial Sequence
  Description of Artificial Sequence: Synthetic peptide
ARGVDQGVDY

SEQ ID NO: 587 - protein, 18 aa, Artificial Sequence
  Description of Artificial Sequence: Synthetic peptide
ARDFNDFWSGYYGPSFDY

SEQ ID NO: 588 - protein, 15 aa, Artificial Sequence
  Description of Artificial Sequence: Synthetic peptide
ARVWVPKVYYYGMDV

SEQ ID NO: 589 - protein, 13 aa, Artificial Sequence
  Description of Artificial Sequence: Synthetic peptide
ARSWSSWSYAFDI

SEQ ID NO: 590 - protein, 13 aa, Artificial Sequence
  Description of Artificial Sequence: Synthetic peptide
ARDSSDPIGAFDI

SEQ ID NO: 591 - protein, 18 aa, Artificial Sequence
  Description of Artificial Sequence: Synthetic peptide
ATIPAAMESAYYYYGMDV

SEQ ID NO: 592 - protein, 6 aa, Artificial Sequence
  Description of Artificial Sequence: Synthetic peptide
AKRLDY

SEQ ID NO: 593 - protein, 12 aa, Artificial Sequence
  Description of Artificial Sequence: Synthetic peptide
AKDYGDYGGMDV

SEQ ID NO: 594 - protein, 9 aa, Artificial Sequence
  Description of Artificial Sequence: Synthetic peptide
VKDLGYKDN

SEQ ID NO: 595 - protein, 15 aa, Artificial Sequence
  Description of Artificial Sequence: Synthetic peptide
AKHARRHDYGDYFDY

SEQ ID NO: 596 - protein, 16 aa, Artificial Sequence
  Description of Artificial Sequence: Synthetic peptide
ARALRGIFGVVNWFDP

SEQ ID NO: 597 - protein, 18 aa, Artificial Sequence
  Description of Artificial Sequence: Synthetic peptide
ARLSRQWLVRPHIYYFDY

SEQ ID NO: 598 - protein, 14 aa, Artificial Sequence
  Description of Artificial Sequence: Synthetic peptide
ARSPIAARAGGFDY

SEQ ID NO: 599 - protein, 14 aa, Artificial Sequence
  Description of Artificial Sequence: Synthetic peptide
ARRGVTISYYYMDV

SEQ ID NO: 600 - protein, 11 aa, Artificial Sequence
  Description of Artificial Sequence: Synthetic peptide
ASVGGDYDLDY

SEQ ID NO: 601 - protein, 16 aa, Artificial Sequence
  Description of Artificial Sequence: Synthetic peptide
ARGATIFGVVIRPFDY

SEQ ID NO: 602 - protein, 20 aa, Artificial Sequence
  Description of Artificial Sequence: Synthetic peptide
ARHTFGITIFGVVTRTGFDP

SEQ ID NO: 603 - protein, 10 aa, Artificial Sequence
  Description of Artificial Sequence: Synthetic peptide
AREMGSGMDV

SEQ ID NO: 604 - protein, 10 aa, Artificial Sequence
  Description of Artificial Sequence: Synthetic peptide
AGSIAVAGAI

SEQ ID NO: 605 - protein, 14 aa, Artificial Sequence
  Description of Artificial Sequence: Synthetic peptide
ARARGGNYYYGMDV

SEQ ID NO: 606 - protein, 21 aa, Artificial Sequence
  Description of Artificial Sequence: Synthetic peptide
ASREVVLRYFDWSSPMGGFDP

SEQ ID NO: 607 - protein, 12 aa, Artificial Sequence
  Description of Artificial Sequence: Synthetic peptide
VRDGYNMIPFDM

SEQ ID NO: 608 - protein, 14 aa, Artificial Sequence
  Description of Artificial Sequence: Synthetic peptide
VRWGPVGNTWAFDY

SEQ ID NO: 609 - protein, 12 aa, Artificial Sequence
  Description of Artificial Sequence: Synthetic peptide
AAMRDGYGSGWL

SEQ ID NO: 610 - protein, 22 aa, Artificial Sequence
  Description of Artificial Sequence: Synthetic peptide
ARGHTSIYGVLIMLFHASWLDP

SEQ ID NO: 611 - protein, 10 aa, Artificial Sequence
  Description of Artificial Sequence: Synthetic peptide
ARDVGGADGH

SEQ ID NO: 612 - protein, 11 aa, Artificial Sequence
  Description of Artificial Sequence: Synthetic peptide
ARLASMNGVDI

SEQ ID NO: 613 - protein, 21 aa, Artificial Sequence
  Description of Artificial Sequence: Synthetic peptide
ARDSETDTSLAVAYYYYYMDV

SEQ ID NO: 614 - protein, 19 aa, Artificial Sequence
  Description of Artificial Sequence: Synthetic peptide
AREGREYSDNSGKRGYFDS

SEQ ID NO: 615 - protein, 14 aa, Artificial Sequence
  Description of Artificial Sequence: Synthetic peptide
AREGEDYSSSYFDH

SEQ ID NO: 616 - protein, 18 aa, Artificial Sequence
  Description of Artificial Sequence: Synthetic peptide
ARHRIVEATFSRYDYFDS

SEQ ID NO: 617 - protein, 20 aa, Artificial Sequence
  Description of Artificial Sequence: Synthetic peptide
ARRSGESNGWGTYYHYGMDV

SEQ ID NO: 618 - protein, 18 aa, Artificial Sequence
  Description of Artificial Sequence: Synthetic peptide
ARGRTPTGTFDYYSYLDV

SEQ ID NO: 619 - protein, 14 aa, Artificial Sequence
  Description of Artificial Sequence: Synthetic peptide
ARWDCTDGTCYAVY

SEQ ID NO: 620 - protein, 24 aa, Artificial Sequence
  Description of Artificial Sequence: Synthetic peptide
ARGLGPPVGSLAITFGGLRRSFDI

SEQ ID NO: 621 - protein, 17 aa, Artificial Sequence
  Description of Artificial Sequence: Synthetic peptide
ATFRRQRGGYYYYGLDL

SEQ ID NO: 622 - protein, 17 aa, Artificial Sequence
  Description of Artificial Sequence: Synthetic peptide
AKVKLTVFGVEQSPLDS

SEQ ID NO: 623 - protein, 16 aa, Artificial Sequence
  Description of Artificial Sequence: Synthetic peptide
TIQARVPSAMKVYFQN

SEQ ID NO: 624 - protein, 11 aa, Artificial Sequence
  Description of Artificial Sequence: Synthetic peptide
TRERFSNYFDP

SEQ ID NO: 625 - protein, 17 aa, Artificial Sequence
  Description of Artificial Sequence: Synthetic peptide
ARGRDVGQWLVGEGFDY

SEQ ID NO: 626 - protein, 15 aa, Artificial Sequence
  Description of Artificial Sequence: Synthetic peptide
ARGKPFDFWSGLFDS

SEQ ID NO: 627 - protein, 22 aa, Artificial Sequence
  Description of Artificial Sequence: Synthetic peptide
ARRKVSFPRPSDDSSFDWFFDL

SEQ ID NO: 628 - protein, 15 aa, Artificial Sequence
  Description of Artificial Sequence: Synthetic peptide
AREDIIENERGGFDI

SEQ ID NO: 629 - protein, 12 aa, Artificial Sequence
  Description of Artificial Sequence: Synthetic peptide
GRDRIALAEIDY

SEQ ID NO: 630 - protein, 15 aa, Artificial Sequence
  Description of Artificial Sequence: Synthetic peptide
VRDRSFEYGDYGGDN

SEQ ID NO: 631 - protein, 24 aa, Artificial Sequence
  Description of Artificial Sequence: Synthetic peptide
TRVPHYYGSDTYYKPWYYYYAMDV

SEQ ID NO: 632 - protein, 18 aa, Artificial Sequence
  Description of Artificial Sequence: Synthetic peptide
AVGYCSSSSCEPQDAFDI

SEQ ID NO: 633 - protein, 15 aa, Artificial Sequence
  Description of Artificial Sequence: Synthetic peptide
ARADHSTYWYGWFDP

SEQ ID NO: 634 - protein, 15 aa, Artificial Sequence
  Description of Artificial Sequence: Synthetic peptide
VKDISSSPANYGFAI

SEQ ID NO: 635 - protein, 13 aa, Artificial Sequence
  Description of Artificial Sequence: Synthetic peptide
ARHAGWFGEHLDY

SEQ ID NO: 636 - protein, 11 aa, Artificial Sequence
  Description of Artificial Sequence: Synthetic peptide
ARMERSGAFDL

SEQ ID NO: 637 - protein, 12 aa, Artificial Sequence
  Description of Artificial Sequence: Synthetic peptide
VGRYGSGNYEGY

SEQ ID NO: 638 - protein, 12 aa, Artificial Sequence
  Description of Artificial Sequence: Synthetic peptide
AKDLLSDRQDPS

SEQ ID NO: 639 - protein, 16 aa, Artificial Sequence
  Description of Artificial Sequence: Synthetic peptide
ASIDERLGILYWYFHL

SEQ ID NO: 640 - protein, 18 aa, Artificial Sequence
  Description of Artificial Sequence: Synthetic peptide
ARVGYCSTTGCDMGGLDY

SEQ ID NO: 641 - protein, 15 aa, Artificial Sequence
  Description of Artificial Sequence: Synthetic peptide
ARLSAQRGNSGPAVY

SEQ ID NO: 642 - protein, 16 aa, Artificial Sequence
  Description of Artificial Sequence: Synthetic peptide
AKSEETMTTVTTFFDY

SEQ ID NO: 643 - protein, 6 aa, Artificial Sequence
  Description of Artificial Sequence: Synthetic peptide
ERSVGY

SEQ ID NO: 644 - protein, 15 aa, Artificial Sequence
  Description of Artificial Sequence: Synthetic peptide
AKSTVTTLRRTYFDS

SEQ ID NO: 645 - protein, 12 aa, Artificial Sequence
  Description of Artificial Sequence: Synthetic peptide
ATHDFGDSEGEY

SEQ ID NO: 646 - protein, 16 aa, Artificial Sequence
  Description of Artificial Sequence: Synthetic peptide
AKDQWADYHTTGDFEY

SEQ ID NO: 647 - protein, 20 aa, Artificial Sequence
  Description of Artificial Sequence: Synthetic peptide
TRDGRLLWFEESDWGDAFGI

SEQ ID NO: 648 - protein, 20 aa, Artificial Sequence
  Description of Artificial Sequence: Synthetic peptide
ARLTVDRRLQGYYYYYYMDV

SEQ ID NO: 649 - protein, 15 aa, Artificial Sequence
  Description of Artificial Sequence: Synthetic peptide
AKQGLLSNYYYGMDV

SEQ ID NO: 650 - protein, 23 aa, Artificial Sequence
  Description of Artificial Sequence: Synthetic peptide
AKDNYYDILTGYYRKYYYFGMDV

SEQ ID NO: 651 - protein, 16 aa, Artificial Sequence
  Description of Artificial Sequence: Synthetic peptide
ARTAGSDDSGYLPFDY

SEQ ID NO: 652 - protein, 20 aa, Artificial Sequence
  Description of Artificial Sequence: Synthetic peptide
SRSPFSISIFGVVIRYGMDV

SEQ ID NO: 653 - protein, 19 aa, Artificial Sequence
  Description of Artificial Sequence: Synthetic peptide
ARAITKITIFGVVIENFDY

SEQ ID NO: 654 - protein, 22 aa, Artificial Sequence
  Description of Artificial Sequence: Synthetic peptide
AREVFEAAAGMLLPYYYYYMDV

SEQ ID NO: 655 - protein, 18 aa, Artificial Sequence
  Description of Artificial Sequence: Synthetic peptide
ARQRREWLGSYYYYGMDV

SEQ ID NO: 656 - protein, 16 aa, Artificial Sequence
  Description of Artificial Sequence: Synthetic peptide
ARVYAGFLEWLSYFDY

SEQ ID NO: 657 - protein, 17 aa, Artificial Sequence
  Description of Artificial Sequence: Synthetic peptide
ARARRITIFGVVGDFGV

SEQ ID NO: 658 - protein, 15 aa, Artificial Sequence
  Description of Artificial Sequence: Synthetic peptide
AKEERVYDILTGYDY

SEQ ID NO: 659 - protein, 22 aa, Artificial Sequence
  Description of Artificial Sequence: Synthetic peptide
ARLKNWNTIFGVVIMAPYYMDV

SEQ ID NO: 660 - protein, 11 aa, Artificial Sequence
  Description of Artificial Sequence: Synthetic peptide
ATGYYGSRFDP

SEQ ID NO: 661 - protein, 15 aa, Artificial Sequence
  Description of Artificial Sequence: Synthetic peptide
ARALVQGVYYYYMDV

SEQ ID NO: 662 - protein, 11 aa, Artificial Sequence
  Description of Artificial Sequence: Synthetic peptide
ARSRSSDYFDY

SEQ ID NO: 663 - protein, 13 aa, Artificial Sequence
  Description of Artificial Sequence: Synthetic peptide
AKGPRSAPDYMDV

SEQ ID NO: 664 - protein, 20 aa, Artificial Sequence
  Description of Artificial Sequence: Synthetic peptide
ARDQRLWSTLGVYYYYYMDV

SEQ ID NO: 665 - protein, 19 aa, Artificial Sequence
  Description of Artificial Sequence: Synthetic peptide
ARRAAPAWTWFGELSPFDY

SEQ ID NO: 666 - protein, 18 aa, Artificial Sequence
  Description of Artificial Sequence: Synthetic peptide
ARSARRWLQYGPDWYFDL

SEQ ID NO: 667 - protein, 21 aa, Artificial Sequence
  Description of Artificial Sequence: Synthetic peptide
ARDPPPRITIFGVGTRLGFDY

SEQ ID NO: 668 - protein, 16 aa, Artificial Sequence
  Description of Artificial Sequence: Synthetic peptide
ARQLLGIWGSYRYIDY

SEQ ID NO: 669 - protein, 13 aa, Artificial Sequence
  Description of Artificial Sequence: Synthetic peptide
ASGRLHLGELLDY

SEQ ID NO: 670 - protein, 23 aa, Artificial Sequence
  Description of Artificial Sequence: Synthetic peptide
ARQPRRITIFGVVIMPTNNWFDP

SEQ ID NO: 671 - protein, 20 aa, Artificial Sequence
  Description of Artificial Sequence: Synthetic peptide
ARSPEVLWFGDPVLDNWFDP

SEQ ID NO: 672 - protein, 15 aa, Artificial Sequence
  Description of Artificial Sequence: Synthetic peptide
ARDPYYDILTGYYLY

SEQ ID NO: 673 - protein, 14 aa, Artificial Sequence
  Description of Artificial Sequence: Synthetic peptide
ARDGRNIAVAGLDY

SEQ ID NO: 674 - protein, 15 aa, Artificial Sequence
  Description of Artificial Sequence: Synthetic peptide
ARHLQPSYGGNAFDI

SEQ ID NO: 675 - protein, 17 aa, Artificial Sequence
  Description of Artificial Sequence: Synthetic peptide
ARDGCSGGSCYSWWFDP

SEQ ID NO: 676 - protein, 19 aa, Artificial Sequence
  Description of Artificial Sequence: Synthetic peptide
ARQKTDIVVVVATEVAFDY

SEQ ID NO: 677 - protein, 18 aa, Artificial Sequence
  Description of Artificial Sequence: Synthetic peptide
ARQVRSGIVVVTPYYFDY

SEQ ID NO: 678 - protein, 17 aa, Artificial Sequence
  Description of Artificial Sequence: Synthetic peptide
ARDQYDSSGYAFGAFDY

SEQ ID NO: 679 - protein, 17 aa, Artificial Sequence
  Description of Artificial Sequence: Synthetic peptide
ARDESVAHYYGSGSVDV

SEQ ID NO: 680 - protein, 17 aa, Artificial Sequence
  Description of Artificial Sequence: Synthetic peptide
ARQFRRWLQLGPSYFDY

SEQ ID NO: 681 - protein, 8 aa, Artificial Sequence
  Description of Artificial Sequence: Synthetic peptide
SRNPFLDY

SEQ ID NO: 682 - protein, 20 aa, Artificial Sequence
  Description of Artificial Sequence: Synthetic peptide
ARDRWGITIFGVVNRDGMDV

SEQ ID NO: 683 - protein, 21 aa, Artificial Sequence
  Description of Artificial Sequence: Synthetic peptide
TTLGHQYYDSSGYDYYYGMDV

SEQ ID NO: 684 - protein, 16 aa, Artificial Sequence
  Description of Artificial Sequence: Synthetic peptide
ARGRLFYDSSGYYFDY

SEQ ID NO: 685 - protein, 17 aa, Artificial Sequence
  Description of Artificial Sequence: Synthetic peptide
ARTLRQWLARGYYYFDY

SEQ ID NO: 686 - protein, 14 aa, Artificial Sequence
  Description of Artificial Sequence: Synthetic peptide
VRHRGWIQLWFFDY

SEQ ID NO: 687 - protein, 19 aa, Artificial Sequence
  Description of Artificial Sequence: Synthetic peptide
ARLRAHTIFGVPIADAFDI

SEQ ID NO: 688 - protein, 22 aa, Artificial Sequence
  Description of Artificial Sequence: Synthetic peptide
ARHLSLITVIVVVTYQLDAFDI

SEQ ID NO: 689 - protein, 20 aa, Artificial Sequence
  Description of Artificial Sequence: Synthetic peptide
ARHYSSITIFGVVSGRYMDV

SEQ ID NO: 690 - protein, 17 aa, Artificial Sequence
  Description of Artificial Sequence: Synthetic peptide
ARDLRGWLQSPNWYFDL

SEQ ID NO: 691 - protein, 10 aa, Artificial Sequence
  Description of Artificial Sequence: Synthetic peptide
AKESGSGYYN

SEQ ID NO: 692 - protein, 11 aa, Artificial Sequence
  Description of Artificial Sequence: Synthetic peptide
AKTSGTGTLAY

SEQ ID NO: 693 - protein, 20 aa, Artificial Sequence
  Description of Artificial Sequence: Synthetic peptide
AREPRRVKQWLVVPYYYMDV

SEQ ID NO: 694 - protein, 20 aa, Artificial Sequence
  Description of Artificial Sequence: Synthetic peptide
ARTLHSTIFGVVIMPSSFDY

SEQ ID NO: 695 - protein, 18 aa, Artificial Sequence
  Description of Artificial Sequence: Synthetic peptide
ARLHRMITFGGVIAQLDV

SEQ ID NO: 696 - protein, 15 aa, Artificial Sequence
  Description of Artificial Sequence: Synthetic peptide
ATAGEQWLDRYYFDY

SEQ ID NO: 697 - protein, 18 aa, Artificial Sequence
  Description of Artificial Sequence: Synthetic peptide
ARARGYQLLFNYYYYMDV

SEQ ID NO: 698 - protein, 16 aa, Artificial Sequence
  Description of Artificial Sequence: Synthetic peptide
ARHKGQWLVRANWFDP

SEQ ID NO: 699 - protein, 18 aa, Artificial Sequence
  Description of Artificial Sequence: Synthetic peptide
ARHLRGGVIVATIYGVDY

SEQ ID NO: 700 - protein, 22 aa, Artificial Sequence
  Description of Artificial Sequence: Synthetic peptide
AREVPTFTIFWPLGRGGGWFDP

SEQ ID NO: 701 - protein, 18 aa, Artificial Sequence
  Description of Artificial Sequence: Synthetic peptide
ARGRLRITIFNRVYYFDY

SEQ ID NO: 702 - protein, 17 aa, Artificial Sequence
  Description of Artificial Sequence: Synthetic peptide
ARGHFDWLLYETYYFDY

SEQ ID NO: 703 - protein, 20 aa, Artificial Sequence
  Description of Artificial Sequence: Synthetic peptide
ARDTVRREQWLVLDYYYMDV

SEQ ID NO: 704 - protein, 23 aa, Artificial Sequence
  Description of Artificial Sequence: Synthetic peptide
ARQPRRITIFGVVITPTNNWFDP

SEQ ID NO: 705 - protein, 11 aa, Artificial Sequence
  Description of Artificial Sequence: Synthetic peptide
ARDYGDFYFDY

SEQ ID NO: 706 - protein, 11 aa, Artificial Sequence
  Description of Artificial Sequence: Synthetic peptide
RASQSVSSYLA

SEQ ID NO: 707 - protein, 12 aa, Artificial Sequence
  Description of Artificial Sequence: Synthetic peptide
RASQSVSSSYLA

SEQ ID NO: 708 - protein, 13 aa, Artificial Sequence
  Description of Artificial Sequence: Synthetic peptide
SGSSSNIGNNYVS

SEQ ID NO: 709 - protein, 11 aa, Artificial Sequence
  Description of Artificial Sequence: Synthetic peptide
RASQSVSSYLA

SEQ ID NO: 710 - protein, 17 aa, Artificial Sequence
  Description of Artificial Sequence: Synthetic peptide
KSSQSVLYSSNNKNYLA

SEQ ID NO: 711 - protein, 13 aa, Artificial Sequence
  Description of Artificial Sequence: Synthetic peptide
SGSSSNIGSNYVY

SEQ ID NO: 712 - protein, 11 aa, Artificial Sequence
  Description of Artificial Sequence: Synthetic peptide
RASQGISSYLA

SEQ ID NO: 713 - protein, 11 aa, Artificial Sequence
  Description of Artificial Sequence: Synthetic peptide
SGDKLGDKYAC

SEQ ID NO: 714 - protein, 11 aa, Artificial Sequence
  Description of Artificial Sequence: Synthetic peptide
GGNNIGSKSVH

SEQ ID NO: 715 - protein, 12 aa, Artificial Sequence
  Description of Artificial Sequence: Synthetic peptide
RASQSVSSSYLA

SEQ ID NO: 716 - protein, 11 aa, Artificial Sequence
  Description of Artificial Sequence: Synthetic peptide
RASQGISNYLA

SEQ ID NO: 717 - protein, 11 aa, Artificial Sequence
  Description of Artificial Sequence: Synthetic peptide
RASQGISSYLA

SEQ ID NO: 718 - protein, 14 aa, Artificial Sequence
  Description of Artificial Sequence: Synthetic peptide
TGSSSNIGAGYDVH

SEQ ID NO: 719 - protein, 11 aa, Artificial Sequence
  Description of Artificial Sequence: Synthetic peptide
SGDKLGDKYAC

SEQ ID NO: 720 - protein, 12 aa, Artificial Sequence
  Description of Artificial Sequence: Synthetic peptide
RASQSVSSSYLA

SEQ ID NO: 721 - protein, 12 aa, Artificial Sequence
  Description of Artificial Sequence: Synthetic peptide
RASQSVSSSYLA

SEQ ID NO: 722 - protein, 11 aa, Artificial Sequence
  Description of Artificial Sequence: Synthetic peptide
QGDSLRSYYAS

SEQ ID NO: 723 - protein, 11 aa, Artificial Sequence
  Description of Artificial Sequence: Synthetic peptide
RASQGISSYLA

SEQ ID NO: 724 - protein, 12 aa, Artificial Sequence
  Description of Artificial Sequence: Synthetic peptide
RASQSVSSSYLA

SEQ ID NO: 725 - protein, 16 aa, Artificial Sequence
  Description of Artificial Sequence: Synthetic peptide
RSSQSLLHSNGYNYLD

SEQ ID NO: 726 - protein, 12 aa, Artificial Sequence
  Description of Artificial Sequence: Synthetic peptide
RASQSVNKFVLA

SEQ ID NO: 727 - protein, 11 aa, Artificial Sequence
  Description of Artificial Sequence: Synthetic peptide
RASQSVSSYLA

SEQ ID NO: 728 - protein, 12 aa, Artificial Sequence
  Description of Artificial Sequence: Synthetic peptide
RASQSITNNYLA

SEQ ID NO: 729 - protein, 11 aa, Artificial Sequence
  Description of Artificial Sequence: Synthetic peptide
RASQDITNSLA

SEQ ID NO: 730 - protein, 11 aa, Artificial Sequence
  Description of Artificial Sequence: Synthetic peptide
RASQSVSAYFA

SEQ ID NO: 731 - protein, 14 aa, Artificial Sequence
  Description of Artificial Sequence: Synthetic peptide
TGHNSNIGAGSDVH

SEQ ID NO: 732 - protein, 11 aa, Artificial Sequence
  Description of Artificial Sequence: Synthetic peptide
SGDKLGDKYAC

SEQ ID NO: 733 - protein, 16 aa, Artificial Sequence
  Description of Artificial Sequence: Synthetic peptide
RSSQSLLHSNGYNYLD

SEQ ID NO: 734 - protein, 11 aa, Artificial Sequence
  Description of Artificial Sequence: Synthetic peptide
RASQSISSYLN

SEQ ID NO: 735 - protein, 13 aa, Artificial Sequence
  Description of Artificial Sequence: Synthetic peptide
TGNTNNIGSHAVG

SEQ ID NO: 736 - protein, 11 aa, Artificial Sequence
  Description of Artificial Sequence: Synthetic peptide
RASQSVSSNLA

SEQ ID NO: 737 - protein, 11 aa, Artificial Sequence
  Description of Artificial Sequence: Synthetic peptide
QGDSLRKYYPT

SEQ ID NO: 738 - protein, 11 aa, Artificial Sequence
  Description of Artificial Sequence: Synthetic peptide
SGDALPKKYAY

SEQ ID NO: 739 - protein, 11 aa, Artificial Sequence
  Description of Artificial Sequence: Synthetic peptide
RASQSINTYLN

SEQ ID NO: 740 - protein, 11 aa, Artificial Sequence
  Description of Artificial Sequence: Synthetic peptide
RASQAITNYLA

SEQ ID NO: 741 - protein, 11 aa, Artificial Sequence
  Description of Artificial Sequence: Synthetic peptide
RASQSVRNFFA

SEQ ID NO: 742 - protein, 11 aa, Artificial Sequence
  Description of Artificial Sequence: Synthetic peptide
SGDALPKKYAY

SEQ ID NO: 743 - protein, 14 aa, Artificial Sequence
  Description of Artificial Sequence: Synthetic peptide
AGSSSNIGTGYDVH

SEQ ID NO: 744 - protein, 11 aa, Artificial Sequence
  Description of Artificial Sequence: Synthetic peptide
QGDSLRNYYAS

SEQ ID NO: 745 - protein, 12 aa, Artificial Sequence
  Description of Artificial Sequence: Synthetic peptide
RASQSVSSSYLA

SEQ ID NO: 746 - protein, 12 aa, Artificial Sequence
  Description of Artificial Sequence: Synthetic peptide
RASQSLSSSNLA

SEQ ID NO: 747 - protein, 14 aa, Artificial Sequence
  Description of Artificial Sequence: Synthetic peptide
TGTSSDVGGYNYVS

SEQ ID NO: 748 - protein, 11 aa, Artificial Sequence
  Description of Artificial Sequence: Synthetic peptide
RASHGISTWLA

SEQ ID NO: 749 - protein, 11 aa, Artificial Sequence
  Description of Artificial Sequence: Synthetic peptide
QGDSLRSYYAS

SEQ ID NO: 750 - protein, 12 aa, Artificial Sequence
  Description of Artificial Sequence: Synthetic peptide
RASQSVSSSYLA

SEQ ID NO: 751 - protein, 11 aa, Artificial Sequence
  Description of Artificial Sequence: Synthetic peptide
QGDSLRSYYAS

SEQ ID NO: 752 - protein, 16 aa, Artificial Sequence
  Description of Artificial Sequence: Synthetic peptide
KSSQSLLQSDGKTYLY

SEQ ID NO: 753 - protein, 11 aa, Artificial Sequence
  Description of Artificial Sequence: Synthetic peptide
SGDKLGDKYAC

SEQ ID NO: 754 - protein, 14 aa, Artificial Sequence
  Description of Artificial Sequence: Synthetic peptide
TGTSSDIGGYNYVS

SEQ ID NO: 755 - protein, 16 aa, Artificial Sequence
  Description of Artificial Sequence: Synthetic peptide
RSSQSLLYSNGNTYLS

SEQ ID NO: 756 - protein, 17 aa, Artificial Sequence
  Description of Artificial Sequence: Synthetic peptide
RSSQSLLDSEDGNTYLD

SEQ ID NO: 757 - protein, 12 aa, Artificial Sequence
  Description of Artificial Sequence: Synthetic peptide
RASQSVTSSYLA

SEQ ID NO: 758 - protein, 13 aa, Artificial Sequence
  Description of Artificial Sequence: Synthetic peptide
TRSSGSIASNYVQ

SEQ ID NO: 759 - protein, 12 aa, Artificial Sequence
  Description of Artificial Sequence: Synthetic peptide
RASQSVSSNYLA

SEQ ID NO: 760 - protein, 11 aa, Artificial Sequence
  Description of Artificial Sequence: Synthetic peptide
RASQSVTTFLG

SEQ ID NO: 761 - protein, 13 aa, Artificial Sequence
  Description of Artificial Sequence: Synthetic peptide
SGSSSNIGKNYVS

SEQ ID NO: 762 - protein, 11 aa, Artificial Sequence
  Description of Artificial Sequence: Synthetic peptide
RASQSISSWLA

SEQ ID NO: 763 - protein, 12 aa, Artificial Sequence
  Description of Artificial Sequence: Synthetic peptide
RASQTVSRNYLA

SEQ ID NO: 764 - protein, 11 aa, Artificial Sequence
  Description of Artificial Sequence: Synthetic peptide
RASQVITNDLG

SEQ ID NO: 765 - protein, 11 aa, Artificial Sequence
  Description of Artificial Sequence: Synthetic peptide
QGDSLRSYYAS

SEQ ID NO: 766 - protein, 11 aa, Artificial Sequence
  Description of Artificial Sequence: Synthetic peptide
RASQSVSSNLA

SEQ ID NO: 767 - protein, 14 aa, Artificial Sequence
  Description of Artificial Sequence: Synthetic peptide
TATSSDIGNYNYVS

SEQ ID NO: 768 - protein, 11 aa, Artificial Sequence
  Description of Artificial Sequence: Synthetic peptide
RASESVSTWLA

SEQ ID NO: 769 - protein, 11 aa, Artificial Sequence
  Description of Artificial Sequence: Synthetic peptide
RTSQIVGVNLA

SEQ ID NO: 770 - protein, 13 aa, Artificial Sequence
  Description of Artificial Sequence: Synthetic peptide
SGSSSNIGSNFVH

SEQ ID NO: 771 - protein, 11 aa, Artificial Sequence
  Description of Artificial Sequence: Synthetic peptide
RASQGISNYLA

SEQ ID NO: 772 - protein, 12 aa, Artificial Sequence
  Description of Artificial Sequence: Synthetic peptide
RASQSLGSSYLA

SEQ ID NO: 773 - protein, 11 aa, Artificial Sequence
  Description of Artificial Sequence: Synthetic peptide
RASQSVSSNLA

SEQ ID NO: 774 - protein, 14 aa, Artificial Sequence
  Description of Artificial Sequence: Synthetic peptide
TGTSSDVGGYNYVS

SEQ ID NO: 775 - protein, 12 aa, Artificial Sequence
  Description of Artificial Sequence: Synthetic peptide
RASQSVSSSYLA

SEQ ID NO: 776 - protein, 14 aa, Artificial Sequence
  Description of Artificial Sequence: Synthetic peptide
TGTSSDVGGYNYVS

SEQ ID NO: 777 - protein, 11 aa, Artificial Sequence
  Description of Artificial Sequence: Synthetic peptide
RASQSVSSNLA

SEQ ID NO: 778 - protein, 11 aa, Artificial Sequence
  Description of Artificial Sequence: Synthetic peptide
RASQSVSSNLA

SEQ ID NO: 779 - protein, 11 aa, Artificial Sequence
  Description of Artificial Sequence: Synthetic peptide
SGYILGDVSAS

SEQ ID NO: 780 - protein, 12 aa, Artificial Sequence
  Description of Artificial Sequence: Synthetic peptide
RASQSVSSSYLA

SEQ ID NO: 781 - protein, 11 aa, Artificial Sequence
  Description of Artificial Sequence: Synthetic peptide
RASQSISTYLN

SEQ ID NO: 782 - protein, 14 aa, Artificial Sequence
  Description of Artificial Sequence: Synthetic peptide
TGTSSDVGGYNYVS

SEQ ID NO: 783 - protein, 12 aa, Artificial Sequence
  Description of Artificial Sequence: Synthetic peptide
TLSSGYYSYKVD

SEQ ID NO: 784 - protein, 12 aa, Artificial Sequence
  Description of Artificial Sequence: Synthetic peptide
RASQSVSSSYLA

SEQ ID NO: 785 - protein, 11 aa, Artificial Sequence
  Description of Artificial Sequence: Synthetic peptide
RASQGISSRLA

SEQ ID NO: 786 - protein, 11 aa, Artificial Sequence
  Description of Artificial Sequence: Synthetic peptide
QGDSLRRYYAS

SEQ ID NO: 787 - protein, 11 aa, Artificial Sequence
  Description of Artificial Sequence: Synthetic peptide
GKNNIESESVH

SEQ ID NO: 788 - protein, 11 aa, Artificial Sequence
  Description of Artificial Sequence: Synthetic peptide
RASQNVGENFA

SEQ ID NO: 789 - protein, 12 aa, Artificial Sequence
  Description of Artificial Sequence: Synthetic peptide
RASQSVSNSYLA

SEQ ID NO: 790 - protein, 16 aa, Artificial Sequence
  Description of Artificial Sequence: Synthetic peptide
KSSQSLLHSDGKTFLY

SEQ ID NO: 791 - protein, 11 aa, Artificial Sequence
  Description of Artificial Sequence: Synthetic peptide
RASQNIDTYLN

SEQ ID NO: 792 - protein, 11 aa, Artificial Sequence
  Description of Artificial Sequence: Synthetic peptide
RASQSVANNLA

SEQ ID NO: 793 - protein, 11 aa, Artificial Sequence
  Description of Artificial Sequence: Synthetic peptide
RASQGISSWLA

SEQ ID NO: 794 - protein, 13 aa, Artificial Sequence
  Description of Artificial Sequence: Synthetic peptide
TGNTNNIGGYAVG

SEQ ID NO: 795 - protein, 14 aa, Artificial Sequence
  Description of Artificial Sequence: Synthetic peptide
TGTSSNIGAGYGVH

SEQ ID NO: 796 - protein, 11 aa, Artificial Sequence
  Description of Artificial Sequence: Synthetic peptide
SGDKLGDKYAC

SEQ ID NO: 797 - protein, 13 aa, Artificial Sequence
  Description of Artificial Sequence: Synthetic peptide
SGSTSNIGSNFVY

SEQ ID NO: 798 - protein, 11 aa, Artificial Sequence
  Description of Artificial Sequence: Synthetic peptide
SGDALPKQYAY

SEQ ID NO: 799 - protein, 17 aa, Artificial Sequence
  Description of Artificial Sequence: Synthetic peptide
KSSQSVLYSSNNKNYLA

SEQ ID NO: 800 - protein, 16 aa, Artificial Sequence
  Description of Artificial Sequence: Synthetic peptide
RSSQSLVHSDGNTYLN

SEQ ID NO: 801 - protein, 16 aa, Artificial Sequence
  Description of Artificial Sequence: Synthetic peptide
RSSQSLVHSDGNTYLS

SEQ ID NO: 802 - protein, 11 aa, Artificial Sequence
  Description of Artificial Sequence: Synthetic peptide
RASQSISSYLN

SEQ ID NO: 803 - protein, 11 aa, Artificial Sequence
  Description of Artificial Sequence: Synthetic peptide
RASQSISSYLN

SEQ ID NO: 804 - protein, 11 aa, Artificial Sequence
  Description of Artificial Sequence: Synthetic peptide
RASQSVSSNLA

SEQ ID NO: 805 - protein, 11 aa, Artificial Sequence
  Description of Artificial Sequence: Synthetic peptide
QASQDISNYLN

SEQ ID NO: 806 - protein, 11 aa, Artificial Sequence
  Description of Artificial Sequence: Synthetic peptide
GGNNIGSKSVH

SEQ ID NO: 807 - protein, 14 aa, Artificial Sequence
  Description of Artificial Sequence: Synthetic peptide
TGTSSDVGGYNYVS

SEQ ID NO: 808 - protein, 14 aa, Artificial Sequence
  Description of Artificial Sequence: Synthetic peptide
TGTSSDVGAYNYVS

SEQ ID NO: 809 - protein, 11 aa, Artificial Sequence
  Description of Artificial Sequence: Synthetic peptide
QGDSLRSYYAS

SEQ ID NO: 810 - protein, 11 aa, Artificial Sequence
  Description of Artificial Sequence: Synthetic peptide
SGDKLGDKYAC

SEQ ID NO: 811 - protein, 12 aa, Artificial Sequence
  Description of Artificial Sequence: Synthetic peptide
RASQSVGSIYLA

SEQ ID NO: 812 - protein, 17 aa, Artificial Sequence
  Description of Artificial Sequence: Synthetic peptide
KSSQSVLYSSNNKNYLA

SEQ ID NO: 813 - protein, 11 aa, Artificial Sequence
  Description of Artificial Sequence: Synthetic peptide
SGDALPKKYAY

SEQ ID NO: 814 - protein, 16 aa, Artificial Sequence
  Description of Artificial Sequence: Synthetic peptide
RSSQSLLHSNGYNYLD

SEQ ID NO: 815 - protein, 11 aa, Artificial Sequence
  Description of Artificial Sequence: Synthetic peptide
SGDALPKQYAY

SEQ ID NO: 816 - protein, 16 aa, Artificial Sequence
  Description of Artificial Sequence: Synthetic peptide
RSSQSLVHSDGNTYLN

SEQ ID NO: 817 - protein, 11 aa, Artificial Sequence
  Description of Artificial Sequence: Synthetic peptide
QGDSLRSYYAS

SEQ ID NO: 818 - protein, 11 aa, Artificial Sequence
  Description of Artificial Sequence: Synthetic peptide
RASQSISSWLA

SEQ ID NO: 819 - protein, 11 aa, Artificial Sequence
  Description of Artificial Sequence: Synthetic peptide
RASQSISSYLN

SEQ ID NO: 820 - protein, 11 aa, Artificial Sequence
  Description of Artificial Sequence: Synthetic peptide
SGDALPKQYAY

SEQ ID NO: 821 - protein, 14 aa, Artificial Sequence
  Description of Artificial Sequence: Synthetic peptide
TLRSGINVDSYRIY

SEQ ID NO: 822 - protein, 11 aa, Artificial Sequence
  Description of Artificial Sequence: Synthetic peptide
SGDKLGDKYAC

SEQ ID NO: 823 - protein, 11 aa, Artificial Sequence
  Description of Artificial Sequence: Synthetic peptide
QASQDISNYLN

SEQ ID NO: 824 - protein, 14 aa, Artificial Sequence
  Description of Artificial Sequence: Synthetic peptide
TGTSSDVGSYNLVS

SEQ ID NO: 825 - protein, 11 aa, Artificial Sequence
  Description of Artificial Sequence: Synthetic peptide
SGDKLGDKYAC

SEQ ID NO: 826 - protein, 11 aa, Artificial Sequence
  Description of Artificial Sequence: Synthetic peptide
SGDKLGDKYAC

SEQ ID NO: 827 - protein, 16 aa, Artificial Sequence
  Description of Artificial Sequence: Synthetic peptide
RSSQSLVHSDGNTYLS

SEQ ID NO: 828 - protein, 17 aa, Artificial Sequence
  Description of Artificial Sequence: Synthetic peptide
KSSQSVLYSSNNKNYLA

SEQ ID NO: 829 - protein, 11 aa, Artificial Sequence
  Description of Artificial Sequence: Synthetic peptide
QGDSLRNYYAS

SEQ ID NO: 830 - protein, 11 aa, Artificial Sequence
  Description of Artificial Sequence: Synthetic peptide
SGDKLGDKYAC

SEQ ID NO: 831 - protein, 12 aa, Artificial Sequence
  Description of Artificial Sequence: Synthetic peptide
RASQSVSSNYLA

SEQ ID NO: 832 - protein, 11 aa, Artificial Sequence
  Description of Artificial Sequence: Synthetic peptide
RASQSVSSYLN

SEQ ID NO: 833 - protein, 11 aa, Artificial Sequence
  Description of Artificial Sequence: Synthetic peptide
RASQSISSYLN

SEQ ID NO: 834 - protein, 14 aa, Artificial Sequence
  Description of Artificial Sequence: Synthetic peptide
GLSSGSVSTTYYPS

SEQ ID NO: 835 - protein, 11 aa, Artificial Sequence
  Description of Artificial Sequence: Synthetic peptide
RASQSVSSYLA

SEQ ID NO: 836 - protein, 12 aa, Artificial Sequence
  Description of Artificial Sequence: Synthetic peptide
RASQSVSSSYLA

SEQ ID NO: 837 - protein, 11 aa, Artificial Sequence
  Description of Artificial Sequence: Synthetic peptide
RASQSISSYLN

SEQ ID NO: 838 - protein, 11 aa, Artificial Sequence
  Description of Artificial Sequence: Synthetic peptide
SGDKLGDKYAC

SEQ ID NO: 839 - protein, 16 aa, Artificial Sequence
  Description of Artificial Sequence: Synthetic peptide
RSSQSLLHSNGYNYLV

SEQ ID NO: 840 - protein, 11 aa, Artificial Sequence
  Description of Artificial Sequence: Synthetic peptide
RASQSISSWLA

SEQ ID NO: 841 - protein, 14 aa, Artificial Sequence
  Description of Artificial Sequence: Synthetic peptide
TGTSSDVGGYNYVS

SEQ ID NO: 842 - protein, 12 aa, Artificial Sequence
  Description of Artificial Sequence: Synthetic peptide
GASRSLGSNYLA

SEQ ID NO: 843 - protein, 12 aa, Artificial Sequence
  Description of Artificial Sequence: Synthetic peptide
TLSSEHSTYTID

SEQ ID NO: 844 - protein, 14 aa, Artificial Sequence
  Description of Artificial Sequence: Synthetic peptide
GLSSGSVSAHYFPT

SEQ ID NO: 845 - protein, 17 aa, Artificial Sequence
  Description of Artificial Sequence: Synthetic peptide
KSSQSVLYNSNNKDYLA

SEQ ID NO: 846 - protein, 16 aa, Artificial Sequence
  Description of Artificial Sequence: Synthetic peptide
RSSESLVHPNGKTWLD

SEQ ID NO: 847 - protein, 12 aa, Artificial Sequence
  Description of Artificial Sequence: Synthetic peptide
RASQSVYGSYLA

SEQ ID NO: 848 - protein, 17 aa, Artificial Sequence
  Description of Artificial Sequence: Synthetic peptide
RASQSVAGSSFGGSYLA

SEQ ID NO: 849 - protein, 11 aa, Artificial Sequence
  Description of Artificial Sequence: Synthetic peptide
RASQSIRNWLA

SEQ ID NO: 850 - protein, 12 aa, Artificial Sequence
  Description of Artificial Sequence: Synthetic peptide
TLSSGYSTYAIA

SEQ ID NO: 851 - protein, 11 aa, Artificial Sequence
  Description of Artificial Sequence: Synthetic peptide
QGDSLRTYYAT

SEQ ID NO: 852 - protein, 14 aa, Artificial Sequence
  Description of Artificial Sequence: Synthetic peptide
ASSTGAVTSGYYPI

SEQ ID NO: 853 - protein, 11 aa, Artificial Sequence
  Description of Artificial Sequence: Synthetic peptide
QGDSLRSYYAS

SEQ ID NO: 854 - protein, 11 aa, Artificial Sequence
  Description of Artificial Sequence: Synthetic peptide
SGDELGRKYVS

SEQ ID NO: 855 - protein, 11 aa, Artificial Sequence
  Description of Artificial Sequence: Synthetic peptide
RASQSISSYLN

SEQ ID NO: 856 - protein, 11 aa, Artificial Sequence
  Description of Artificial Sequence: Synthetic peptide
QASQDISNYLN

SEQ ID NO: 857 - protein, 16 aa, Artificial Sequence
  Description of Artificial Sequence: Synthetic peptide
RSSQSLLHNDGYNYLD

SEQ ID NO: 858 - protein, 14 aa, Artificial Sequence
  Description of Artificial Sequence: Synthetic peptide
TGSSSNIGAGYDVH

SEQ ID NO: 859 - protein, 11 aa, Artificial Sequence
  Description of Artificial Sequence: Synthetic peptide
RASQSVSSFLG

SEQ ID NO: 860 - protein, 11 aa, Artificial Sequence
  Description of Artificial Sequence: Synthetic peptide
RASQDISSALA

SEQ ID NO: 861 - protein, 16 aa, Artificial Sequence
  Description of Artificial Sequence: Synthetic peptide
KSSQTLLHSDGKTYLY

SEQ ID NO: 862 - protein, 11 aa, Artificial Sequence
  Description of Artificial Sequence: Synthetic peptide
QASQDISNFLN

SEQ ID NO: 863 - protein, 11 aa, Artificial Sequence
  Description of Artificial Sequence: Synthetic peptide
SGDELPKQYAS

SEQ ID NO: 864 - protein, 11 aa, Artificial Sequence
  Description of Artificial Sequence: Synthetic peptide
RASQSVGNNVA

SEQ ID NO: 865 - protein, 11 aa, Artificial Sequence
  Description of Artificial Sequence: Synthetic peptide
SGDALPNQYVY

SEQ ID NO: 866 - protein, 14 aa, Artificial Sequence
  Description of Artificial Sequence: Synthetic peptide
TGTSSDVGGYNYVS

SEQ ID NO: 867 - protein, 16 aa, Artificial Sequence
  Description of Artificial Sequence: Synthetic peptide
KSSQSLLHSAGKTYLY

SEQ ID NO: 868 - protein, 13 aa, Artificial Sequence
  Description of Artificial Sequence: Synthetic peptide
SGSTSNIGSNYVF

SEQ ID NO: 869 - protein, 11 aa, Artificial Sequence
  Description of Artificial Sequence: Synthetic peptide
RASQSISTFVN

SEQ ID NO: 870 - protein, 12 aa, Artificial Sequence
  Description of Artificial Sequence: Synthetic peptide
RASQSVSSGYLA

SEQ ID NO: 871 - protein, 12 aa, Artificial Sequence
  Description of Artificial Sequence: Synthetic peptide
RASQTISSRYLA

SEQ ID NO: 872 - protein, 13 aa, Artificial Sequence
  Description of Artificial Sequence: Synthetic peptide
TRSSGSIASNYVQ

SEQ ID NO: 873 - protein, 16 aa, Artificial Sequence
  Description of Artificial Sequence: Synthetic peptide
RSSESLVHTDGNTYLN

SEQ ID NO: 874 - protein, 11 aa, Artificial Sequence
  Description of Artificial Sequence: Synthetic peptide
RASQTFSSNLA

SEQ ID NO: 875 - protein, 12 aa, Artificial Sequence
  Description of Artificial Sequence: Synthetic peptide
RASQSISSTYLA

SEQ ID NO: 876 - protein, 11 aa, Artificial Sequence
  Description of Artificial Sequence: Synthetic peptide
GGNNIGRKSVH

SEQ ID NO: 877 - protein, 12 aa, Artificial Sequence
  Description of Artificial Sequence: Synthetic peptide
TLSSGHSSYPIA

SEQ ID NO: 878 - protein, 11 aa, Artificial Sequence
  Description of Artificial Sequence: Synthetic peptide
RTSQSIATYLN

SEQ ID NO: 879 - protein, 11 aa, Artificial Sequence
  Description of Artificial Sequence: Synthetic peptide
RASQGISNLLA

SEQ ID NO: 880 - protein, 14 aa, Artificial Sequence
  Description of Artificial Sequence: Synthetic peptide
GSSTGPVTSGRYPY

SEQ ID NO: 881 - protein, 14 aa, Artificial Sequence
  Description of Artificial Sequence: Synthetic peptide
TGSSSDVGGYNYVS

SEQ ID NO: 882 - protein, 16 aa, Artificial Sequence
  Description of Artificial Sequence: Synthetic peptide
RSSQSLVYSDGNTYLN

SEQ ID NO: 883 - protein, 14 aa, Artificial Sequence
  Description of Artificial Sequence: Synthetic peptide
TGSSSNIGAGYDVH

SEQ ID NO: 884 - protein, 17 aa, Artificial Sequence
  Description of Artificial Sequence: Synthetic peptide
KSSQSVLYSSNNKNYLT

SEQ ID NO: 885 - protein, 11 aa, Artificial Sequence
  Description of Artificial Sequence: Synthetic peptide
RASQGISNYLA

SEQ ID NO: 886 - protein, 11 aa, Artificial Sequence
  Description of Artificial Sequence: Synthetic peptide
SGDALPKKYAS

SEQ ID NO: 887 - protein, 11 aa, Artificial Sequence
  Description of Artificial Sequence: Synthetic peptide
RASQGISSYLA

SEQ ID NO: 888 - protein, 12 aa, Artificial Sequence
  Description of Artificial Sequence: Synthetic peptide
RASQSVSSSYLA

SEQ ID NO: 889 - protein, 11 aa, Artificial Sequence
  Description of Artificial Sequence: Synthetic peptide
QGDSLRSYYAS

SEQ ID NO: 890 - protein, 11 aa, Artificial Sequence
  Description of Artificial Sequence: Synthetic peptide
RASQSISSYLN

SEQ ID NO: 891 - protein, 11 aa, Artificial Sequence
  Description of Artificial Sequence: Synthetic peptide
QGDSLRSYYAS

SEQ ID NO: 892 - protein, 12 aa, Artificial Sequence
  Description of Artificial Sequence: Synthetic peptide
RASQSVSSSYLA

SEQ ID NO: 893 - protein, 11 aa, Artificial Sequence
  Description of Artificial Sequence: Synthetic peptide
SGDALPKQYAY

SEQ ID NO: 894 - protein, 11 aa, Artificial Sequence
  Description of Artificial Sequence: Synthetic peptide
RASQSVSSYLA

SEQ ID NO: 895 - protein, 11 aa, Artificial Sequence
  Description of Artificial Sequence: Synthetic peptide
GGNNIGSKSVH

SEQ ID NO: 896 - protein, 11 aa, Artificial Sequence
  Description of Artificial Sequence: Synthetic peptide
RASQSVSSKLA

SEQ ID NO: 897 - protein, 11 aa, Artificial Sequence
  Description of Artificial Sequence: Synthetic peptide
RASQSISSWLA

SEQ ID NO: 898 - protein, 11 aa, Artificial Sequence
  Description of Artificial Sequence: Synthetic peptide
RASQSISSWLA

SEQ ID NO: 899 - protein, 11 aa, Artificial Sequence
  Description of Artificial Sequence: Synthetic peptide
RASQSISSYLN

SEQ ID NO: 900 - protein, 11 aa, Artificial Sequence
  Description of Artificial Sequence: Synthetic peptide
RASQSINNWLA

SEQ ID NO: 901 - protein, 14 aa, Artificial Sequence
  Description of Artificial Sequence: Synthetic peptide
TGTSSDVGGYNYVS

SEQ ID NO: 902 - protein, 11 aa, Artificial Sequence
  Description of Artificial Sequence: Synthetic peptide
RASQSVSSNLA

SEQ ID NO: 903 - protein, 11 aa, Artificial Sequence
  Description of Artificial Sequence: Synthetic peptide
RASQGISSYLA

SEQ ID NO: 904 - protein, 14 aa, Artificial Sequence
  Description of Artificial Sequence: Synthetic peptide
TGTSSDVGGYNYVS

SEQ ID NO: 905 - protein, 14 aa, Artificial Sequence
  Description of Artificial Sequence: Synthetic peptide
TGSSSNIGAGYDVH

SEQ ID NO: 906 - protein, 11 aa, Artificial Sequence
  Description of Artificial Sequence: Synthetic peptide
SGDALPKQYAY

SEQ ID NO: 907 - protein, 11 aa, Artificial Sequence
  Description of Artificial Sequence: Synthetic peptide
RASQSISSYLN

SEQ ID NO: 908 - protein, 11 aa, Artificial Sequence
  Description of Artificial Sequence: Synthetic peptide
RASQSISRWLA

SEQ ID NO: 909 - protein, 14 aa, Artificial Sequence
  Description of Artificial Sequence: Synthetic peptide
TGSSSNIGAGYDVH

SEQ ID NO: 910 - protein, 11 aa, Artificial Sequence
  Description of Artificial Sequence: Synthetic peptide
RASQSISSYLN

SEQ ID NO: 911 - protein, 17 aa, Artificial Sequence
  Description of Artificial Sequence: Synthetic peptide
KSSQSVLYSSNNKNYLA

SEQ ID NO: 912 - protein, 12 aa, Artificial Sequence
  Description of Artificial Sequence: Synthetic peptide
RASQSVSSSYLA

SEQ ID NO: 913 - protein, 11 aa, Artificial Sequence
  Description of Artificial Sequence: Synthetic peptide
SGDKLGDKYAC

SEQ ID NO: 914 - protein, 11 aa, Artificial Sequence
  Description of Artificial Sequence: Synthetic peptide
QGDSLRSYYAS

SEQ ID NO: 915 - protein, 11 aa, Artificial Sequence
  Description of Artificial Sequence: Synthetic peptide
RASQSISSWLA

SEQ ID NO: 916 - protein, 11 aa, Artificial Sequence
  Description of Artificial Sequence: Synthetic peptide
RASQGIKYYLA

SEQ ID NO: 917 - protein, 11 aa, Artificial Sequence
  Description of Artificial Sequence: Synthetic peptide
RASQSISSYLN

SEQ ID NO: 918 - protein, 11 aa, Artificial Sequence
  Description of Artificial Sequence: Synthetic peptide
RASQSISSWLA

SEQ ID NO: 919 - protein, 11 aa, Artificial Sequence
  Description of Artificial Sequence: Synthetic peptide
SGDALPKKYAY

SEQ ID NO: 920 - protein, 12 aa, Artificial Sequence
  Description of Artificial Sequence: Synthetic peptide
RASQSVSSSYLA

SEQ ID NO: 921 - protein, 14 aa, Artificial Sequence
  Description of Artificial Sequence: Synthetic peptide
TGTSSDVGGYNYVS

SEQ ID NO: 922 - protein, 12 aa, Artificial Sequence
  Description of Artificial Sequence: Synthetic peptide
RASQSVSSSYLA

SEQ ID NO: 923 - protein, 11 aa, Artificial Sequence
  Description of Artificial Sequence: Synthetic peptide
QGDSLRSYYAS

SEQ ID NO: 924 - protein, 14 aa, Artificial Sequence
  Description of Artificial Sequence: Synthetic peptide
TGTSSDVGSYNLVS

SEQ ID NO: 925 - protein, 12 aa, Artificial Sequence
  Description of Artificial Sequence: Synthetic peptide
RASQSVSSSYLA

SEQ ID NO: 926 - protein, 11 aa, Artificial Sequence
  Description of Artificial Sequence: Synthetic peptide
SGDKLGDKYAC

SEQ ID NO: 927 - protein, 11 aa, Artificial Sequence
  Description of Artificial Sequence: Synthetic peptide
SGDKLGDKYAC

SEQ ID NO: 928 - protein, 11 aa, Artificial Sequence
  Description of Artificial Sequence: Synthetic peptide
SGDKLGDKYAC

SEQ ID NO: 929 - protein, 11 aa, Artificial Sequence
  Description of Artificial Sequence: Synthetic peptide
RASQSISSWLA

SEQ ID NO: 930 - protein, 12 aa, Artificial Sequence
  Description of Artificial Sequence: Synthetic peptide
RASQSVSSSYLA

SEQ ID NO: 931 - protein, 14 aa, Artificial Sequence
  Description of Artificial Sequence: Synthetic peptide
TGSSSNIGAGYDVH

SEQ ID NO: 932 - protein, 11 aa, Artificial Sequence
  Description of Artificial Sequence: Synthetic peptide
SGDKLGDKYAC

SEQ ID NO: 933 - protein, 11 aa, Artificial Sequence
  Description of Artificial Sequence: Synthetic peptide
QGDSLRSYYAS

SEQ ID NO: 934 - protein, 12 aa, Artificial Sequence
  Description of Artificial Sequence: Synthetic peptide
RASQSVSSSYLA

SEQ ID NO: 935 - protein, 14 aa, Artificial Sequence
  Description of Artificial Sequence: Synthetic peptide
TGTSSDVGSYNLVS

SEQ ID NO: 936 - protein, 11 aa, Artificial Sequence
  Description of Artificial Sequence: Synthetic peptide
SGDKLGDKYAC

SEQ ID NO: 937 - protein, 14 aa, Artificial Sequence
  Description of Artificial Sequence: Synthetic peptide
TGTSSDVGGYNYVS

SEQ ID NO: 938 - protein, 11 aa, Artificial Sequence
  Description of Artificial Sequence: Synthetic peptide
SGDKLGDKYAC

SEQ ID NO: 939 - protein, 14 aa, Artificial Sequence
  Description of Artificial Sequence: Synthetic peptide
TGSSSNIGAGYDVH

SEQ ID NO: 940 - protein, 11 aa, Artificial Sequence
  Description of Artificial Sequence: Synthetic peptide
RASQSVSSNLA

SEQ ID NO: 941 - protein, 7 aa, Artificial Sequence
  Description of Artificial Sequence: Synthetic peptide
DASNRAT

SEQ ID NO: 942 - protein, 7 aa, Artificial Sequence
  Description of Artificial Sequence: Synthetic peptide
GASSRAT

SEQ ID NO: 943 - protein, 7 aa, Artificial Sequence
  Description of Artificial Sequence: Synthetic peptide
DNNKRPS

SEQ ID NO: 944 - protein, 7 aa, Artificial Sequence
  Description of Artificial Sequence: Synthetic peptide
DASNRAT

SEQ ID NO: 945 - protein, 7 aa, Artificial Sequence
  Description of Artificial Sequence: Synthetic peptide
WASTRES

SEQ ID NO: 946 - protein, 7 aa, Artificial Sequence
  Description of Artificial Sequence: Synthetic peptide
RNNQRPS

SEQ ID NO: 947 - protein, 7 aa, Artificial Sequence
  Description of Artificial Sequence: Synthetic peptide
AASTLQS

SEQ ID NO: 948 - protein, 7 aa, Artificial Sequence
  Description of Artificial Sequence: Synthetic peptide
QDSKRPS

SEQ ID NO: 949 - protein, 7 aa, Artificial Sequence
  Description of Artificial Sequence: Synthetic peptide
DDSDRPS

SEQ ID NO: 950 - protein, 7 aa, Artificial Sequence
  Description of Artificial Sequence: Synthetic peptide
GASSRAT

SEQ ID NO: 951 - protein, 7 aa, Artificial Sequence
  Description of Artificial Sequence: Synthetic peptide
AASSLQS

SEQ ID NO: 952 - protein, 7 aa, Artificial Sequence
  Description of Artificial Sequence: Synthetic peptide
AASTLQS

SEQ ID NO: 953 - protein, 7 aa, Artificial Sequence
  Description of Artificial Sequence: Synthetic peptide
GNSNRPS

SEQ ID NO: 954 - protein, 7 aa, Artificial Sequence
  Description of Artificial Sequence: Synthetic peptide
QDTKRPS

SEQ ID NO: 955 - protein, 7 aa, Artificial Sequence
  Description of Artificial Sequence: Synthetic peptide
GASSRAT

SEQ ID NO: 956 - protein, 7 aa, Artificial Sequence
  Description of Artificial Sequence: Synthetic peptide
GASSRAT

SEQ ID NO: 957 - protein, 7 aa, Artificial Sequence
  Description of Artificial Sequence: Synthetic peptide
GKNNRPS

SEQ ID NO: 958 - protein, 7 aa, Artificial Sequence
  Description of Artificial Sequence: Synthetic peptide
AASTLQS

SEQ ID NO: 959 - protein, 7 aa, Artificial Sequence
  Description of Artificial Sequence: Synthetic peptide
GASSRAT

SEQ ID NO: 960 - protein, 7 aa, Artificial Sequence
  Description of Artificial Sequence: Synthetic peptide
LGSNRAS

SEQ ID NO: 961 - protein, 7 aa, Artificial Sequence
  Description of Artificial Sequence: Synthetic peptide
GASTRAT

SEQ ID NO: 962 - protein, 7 aa, Artificial Sequence
  Description of Artificial Sequence: Synthetic peptide
DASSRAT

SEQ ID NO: 963 - protein, 7 aa, Artificial Sequence
  Description of Artificial Sequence: Synthetic peptide
HASKRAS

SEQ ID NO: 964 - protein, 7 aa, Artificial Sequence
  Description of Artificial Sequence: Synthetic peptide
AASTLHS

SEQ ID NO: 965 - protein, 7 aa, Artificial Sequence
  Description of Artificial Sequence: Synthetic peptide
DATNRAT

SEQ ID NO: 966 - protein, 7 aa, Artificial Sequence
  Description of Artificial Sequence: Synthetic peptide
GNRNRPS

SEQ ID NO: 967 - protein, 7 aa, Artificial Sequence
  Description of Artificial Sequence: Synthetic peptide
QDSKRPS

SEQ ID NO: 968 - protein, 7 aa, Artificial Sequence
  Description of Artificial Sequence: Synthetic peptide
LGSNRAS

SEQ ID NO: 969 - protein, 7 aa, Artificial Sequence
  Description of Artificial Sequence: Synthetic peptide
AASSLQS

SEQ ID NO: 970 - protein, 6 aa, Artificial Sequence
  Description of Artificial Sequence: Synthetic peptide
RNSLPS

SEQ ID NO: 971 - protein, 7 aa, Artificial Sequence
  Description of Artificial Sequence: Synthetic peptide
GASTRAT

SEQ ID NO: 972 - protein, 7 aa, Artificial Sequence
  Description of Artificial Sequence: Synthetic peptide
GKNTRHS

SEQ ID NO: 973 - protein, 7 aa, Artificial Sequence
  Description of Artificial Sequence: Synthetic peptide
EDTKRPS

SEQ ID NO: 974 - protein, 7 aa, Artificial Sequence
  Description of Artificial Sequence: Synthetic peptide
LASSLQS

SEQ ID NO: 975 - protein, 7 aa, Artificial Sequence
  Description of Artificial Sequence: Synthetic peptide
SASTLQS

SEQ ID NO: 976 - protein, 7 aa, Artificial Sequence
  Description of Artificial Sequence: Synthetic peptide
GASNRAT

SEQ ID NO: 977 - protein, 7 aa, Artificial Sequence
  Description of Artificial Sequence: Synthetic peptide
EDSKRPS

SEQ ID NO: 978 - protein, 7 aa, Artificial Sequence
  Description of Artificial Sequence: Synthetic peptide
GNTNRPS

SEQ ID NO: 979 - protein, 7 aa, Artificial Sequence
  Description of Artificial Sequence: Synthetic peptide
GKNNRPS

SEQ ID NO: 980 - protein, 7 aa, Artificial Sequence
  Description of Artificial Sequence: Synthetic peptide
GASSRAT

SEQ ID NO: 981 - protein, 7 aa, Artificial Sequence
  Description of Artificial Sequence: Synthetic peptide
GASSRAT

SEQ ID NO: 982 - protein, 7 aa, Artificial Sequence
  Description of Artificial Sequence: Synthetic peptide
DVSNRPS

SEQ ID NO: 983 - protein, 7 aa, Artificial Sequence
  Description of Artificial Sequence: Synthetic peptide
AASNLQS

SEQ ID NO: 984 - protein, 7 aa, Artificial Sequence
  Description of Artificial Sequence: Synthetic peptide
GKNNRPS

SEQ ID NO: 985 - protein, 7 aa, Artificial Sequence
  Description of Artificial Sequence: Synthetic peptide
GASSRAT

SEQ ID NO: 986 - protein, 7 aa, Artificial Sequence
  Description of Artificial Sequence: Synthetic peptide
GKNNRPS

SEQ ID NO: 987 - protein, 7 aa, Artificial Sequence
  Description of Artificial Sequence: Synthetic peptide
EVSKRFS

SEQ ID NO: 988 - protein, 7 aa, Artificial Sequence
  Description of Artificial Sequence: Synthetic peptide
QDSKRPS

SEQ ID NO: 989 - protein, 7 aa, Artificial Sequence
  Description of Artificial Sequence: Synthetic peptide
DVNKRPS

SEQ ID NO: 990 - protein, 7 aa, Artificial Sequence
  Description of Artificial Sequence: Synthetic peptide
KVSIRDS

SEQ ID NO: 991 - protein, 7 aa, Artificial Sequence
  Description of Artificial Sequence: Synthetic peptide
TLSYRAS

SEQ ID NO: 992 - protein, 7 aa, Artificial Sequence
  Description of Artificial Sequence: Synthetic peptide
GASSRAT

SEQ ID NO: 993 - protein, 7 aa, Artificial Sequence
  Description of Artificial Sequence: Synthetic peptide
EDNQRPS

SEQ ID NO: 994 - protein, 7 aa, Artificial Sequence
  Description of Artificial Sequence: Synthetic peptide
GASSRAT

SEQ ID NO: 995 - protein, 7 aa, Artificial Sequence
  Description of Artificial Sequence: Synthetic peptide
DASNRAP

SEQ ID NO: 996 - protein, 7 aa, Artificial Sequence
  Description of Artificial Sequence: Synthetic peptide
DNNKRPS

SEQ ID NO: 997 - protein, 7 aa, Artificial Sequence
  Description of Artificial Sequence: Synthetic peptide
KASSLES

SEQ ID NO: 998 - protein, 7 aa, Artificial Sequence
  Description of Artificial Sequence: Synthetic peptide
SASIRAT

SEQ ID NO: 999 - protein, 7 aa, Artificial Sequence
  Description of Artificial Sequence: Synthetic peptide
ATSRLQS

SEQ ID NO: 1000 - protein, 7 aa, Artificial Sequence
  Description of Artificial Sequence: Synthetic peptide
GKNNRPS

SEQ ID NO: 1001 - protein, 7 aa, Artificial Sequence
  Description of Artificial Sequence: Synthetic peptide
GASTRAT

SEQ ID NO: 1002 - protein, 7 aa, Artificial Sequence
  Description of Artificial Sequence: Synthetic peptide
EVSSRPS

SEQ ID NO: 1003 - protein, 7 aa, Artificial Sequence
  Description of Artificial Sequence: Synthetic peptide
KASNLES

SEQ ID NO: 1004 - protein, 7 aa, Artificial Sequence
  Description of Artificial Sequence: Synthetic peptide
GASTRAT

SEQ ID NO: 1005 - protein, 7 aa, Artificial Sequence
  Description of Artificial Sequence: Synthetic peptide
RNNERPS

SEQ ID NO: 1006 - protein, 7 aa, Artificial Sequence
  Description of Artificial Sequence: Synthetic peptide
AASTLQS

SEQ ID NO: 1007 - protein, 7 aa, Artificial Sequence
  Description of Artificial Sequence: Synthetic peptide
GASTRAT

SEQ ID NO: 1008 - protein, 7 aa, Artificial Sequence
  Description of Artificial Sequence: Synthetic peptide
GASTRAT

SEQ ID NO: 1009 - protein, 7 aa, Artificial Sequence
  Description of Artificial Sequence: Synthetic peptide
DVSNRPS

SEQ ID NO: 1010 - protein, 7 aa, Artificial Sequence
  Description of Artificial Sequence: Synthetic peptide
GASSRAT

SEQ ID NO: 1011 - protein, 7 aa, Artificial Sequence
  Description of Artificial Sequence: Synthetic peptide
DVSKRPS

SEQ ID NO: 1012 - protein, 7 aa, Artificial Sequence
  Description of Artificial Sequence: Synthetic peptide
GASTRAT

SEQ ID NO: 1013 - protein, 7 aa, Artificial Sequence
  Description of Artificial Sequence: Synthetic peptide
GASTRAT

SEQ ID NO: 1014 - protein, 7 aa, Artificial Sequence
  Description of Artificial Sequence: Synthetic peptide
QDTKRPS

SEQ ID NO: 1015 - protein, 7 aa, Artificial Sequence
  Description of Artificial Sequence: Synthetic peptide
GASSRAT

SEQ ID NO: 1016 - protein, 7 aa, Artificial Sequence
  Description of Artificial Sequence: Synthetic peptide
AASSLQS

SEQ ID NO: 1017 - protein, 7 aa, Artificial Sequence
  Description of Artificial Sequence: Synthetic peptide
DVSKRPS

SEQ ID NO: 1018 - protein, 12 aa, Artificial Sequence
  Description of Artificial Sequence: Synthetic peptide
VGTGGIVKAKGD

SEQ ID NO: 1019 - protein, 7 aa, Artificial Sequence
  Description of Artificial Sequence: Synthetic peptide
GASSRAT

SEQ ID NO: 1020 - protein, 7 aa, Artificial Sequence
  Description of Artificial Sequence: Synthetic peptide
ASSTLQS

SEQ ID NO: 1021 - protein, 7 aa, Artificial Sequence
  Description of Artificial Sequence: Synthetic peptide
GKNKRPS

SEQ ID NO: 1022 - protein, 7 aa, Artificial Sequence
  Description of Artificial Sequence: Synthetic peptide
DDSDRPS

SEQ ID NO: 1023 - protein, 7 aa, Artificial Sequence
  Description of Artificial Sequence: Synthetic peptide
GKSIRAT

SEQ ID NO: 1024 - protein, 7 aa, Artificial Sequence
  Description of Artificial Sequence: Synthetic peptide
GASSRAT

SEQ ID NO: 1025 - protein, 7 aa, Artificial Sequence
  Description of Artificial Sequence: Synthetic peptide
EVSNRFS

SEQ ID NO: 1026 - protein, 7 aa, Artificial Sequence
  Description of Artificial Sequence: Synthetic peptide
AASSLRS

SEQ ID NO: 1027 - protein, 7 aa, Artificial Sequence
  Description of Artificial Sequence: Synthetic peptide
TASTRAP

SEQ ID NO: 1028 - protein, 7 aa, Artificial Sequence
  Description of Artificial Sequence: Synthetic peptide
AASSLQS

SEQ ID NO: 1029 - protein, 6 aa, Artificial Sequence
  Description of Artificial Sequence: Synthetic peptide
GNSLPS

SEQ ID NO: 1030 - protein, 7 aa, Artificial Sequence
  Description of Artificial Sequence: Synthetic peptide
DNTNRPS

SEQ ID NO: 1031 - protein, 7 aa, Artificial Sequence
  Description of Artificial Sequence: Synthetic peptide
QDSKRPS

SEQ ID NO: 1032 - protein, 7 aa, Artificial Sequence
  Description of Artificial Sequence: Synthetic peptide
RNTQRPS

SEQ ID NO: 1033 - protein, 7 aa, Artificial Sequence
  Description of Artificial Sequence: Synthetic peptide
KDSERPS

SEQ ID NO: 1034 - protein, 7 aa, Artificial Sequence
  Description of Artificial Sequence: Synthetic peptide
WASTRQS

SEQ ID NO: 1035 - protein, 7 aa, Artificial Sequence
  Description of Artificial Sequence: Synthetic peptide
KVSNRDS

SEQ ID NO: 1036 - protein, 7 aa, Artificial Sequence
  Description of Artificial Sequence: Synthetic peptide
KISNRFS

SEQ ID NO: 1037 - protein, 7 aa, Artificial Sequence
  Description of Artificial Sequence: Synthetic peptide
AASSLQS

SEQ ID NO: 1038 - protein, 7 aa, Artificial Sequence
  Description of Artificial Sequence: Synthetic peptide
AASSLQS

SEQ ID NO: 1039 - protein, 7 aa, Artificial Sequence
  Description of Artificial Sequence: Synthetic peptide
GASTRAT

SEQ ID NO: 1040 - protein, 7 aa, Artificial Sequence
  Description of Artificial Sequence: Synthetic peptide
DASNLET

SEQ ID NO: 1041 - protein, 7 aa, Artificial Sequence
  Description of Artificial Sequence: Synthetic peptide
DDSDRPS

SEQ ID NO: 1042 - protein, 7 aa, Artificial Sequence
  Description of Artificial Sequence: Synthetic peptide
DVSNRPS

SEQ ID NO: 1043 - protein, 7 aa, Artificial Sequence
  Description of Artificial Sequence: Synthetic peptide
EVSNRPS

SEQ ID NO: 1044 - protein, 7 aa, Artificial Sequence
  Description of Artificial Sequence: Synthetic peptide
GKNNRPS

SEQ ID NO: 1045 - protein, 7 aa, Artificial Sequence
  Description of Artificial Sequence: Synthetic peptide
QDSKRPS

SEQ ID NO: 1046 - protein, 7 aa, Artificial Sequence
  Description of Artificial Sequence: Synthetic peptide
GASSRAT

SEQ ID NO: 1047 - protein, 7 aa, Artificial Sequence
  Description of Artificial Sequence: Synthetic peptide
WASTRES

SEQ ID NO: 1048 - protein, 7 aa, Artificial Sequence
  Description of Artificial Sequence: Synthetic peptide
EDSKRPS

SEQ ID NO: 1049 - protein, 7 aa, Artificial Sequence
  Description of Artificial Sequence: Synthetic peptide
LGSNRAS

SEQ ID NO: 1050 - protein, 7 aa, Artificial Sequence
  Description of Artificial Sequence: Synthetic peptide
KDSERPS

SEQ ID NO: 1051 - protein, 7 aa, Artificial Sequence
  Description of Artificial Sequence: Synthetic peptide
KVSNRDS

SEQ ID NO: 1052 - protein, 7 aa, Artificial Sequence
  Description of Artificial Sequence: Synthetic peptide
GKNNRPS

SEQ ID NO: 1053 - protein, 7 aa, Artificial Sequence
  Description of Artificial Sequence: Synthetic peptide
KASSLES

SEQ ID NO: 1054 - protein, 7 aa, Artificial Sequence
  Description of Artificial Sequence: Synthetic peptide
AASSLQS

SEQ ID NO: 1055 - protein, 7 aa, Artificial Sequence
  Description of Artificial Sequence: Synthetic peptide
KDSERPS

SEQ ID NO: 1056 - protein, 11 aa, Artificial Sequence
  Description of Artificial Sequence: Synthetic peptide
YKSAADKEQGS

SEQ ID NO: 1057 - protein, 7 aa, Artificial Sequence
  Description of Artificial Sequence: Synthetic peptide
QDSKRPS

SEQ ID NO: 1058 - protein, 7 aa, Artificial Sequence
  Description of Artificial Sequence: Synthetic peptide
DASNLET

SEQ ID NO: 1059 - protein, 7 aa, Artificial Sequence
  Description of Artificial Sequence: Synthetic peptide
EGSKRPS

SEQ ID NO: 1060 - protein, 7 aa, Artificial Sequence
  Description of Artificial Sequence: Synthetic peptide
QDSKRPS

SEQ ID NO: 1061 - protein, 7 aa, Artificial Sequence
  Description of Artificial Sequence: Synthetic peptide
QDSKRPS

SEQ ID NO: 1062 - protein, 7 aa, Artificial Sequence
  Description of Artificial Sequence: Synthetic peptide
KISNRFS

SEQ ID NO: 1063 - protein, 7 aa, Artificial Sequence
  Description of Artificial Sequence: Synthetic peptide
WASTRES

SEQ ID NO: 1064 - protein, 7 aa, Artificial Sequence
  Description of Artificial Sequence: Synthetic peptide
AQNNRPS

SEQ ID NO: 1065 - protein, 7 aa, Artificial Sequence
  Description of Artificial Sequence: Synthetic peptide
QDTKRPS

SEQ ID NO: 1066 - protein, 7 aa, Artificial Sequence
  Description of Artificial Sequence: Synthetic peptide
GASSRAT

SEQ ID NO: 1067 - protein, 7 aa, Artificial Sequence
  Description of Artificial Sequence: Synthetic peptide
AASSLQS

SEQ ID NO: 1068 - protein, 7 aa, Artificial Sequence
  Description of Artificial Sequence: Synthetic peptide
AASSLQS

SEQ ID NO: 1069 - protein, 7 aa, Artificial Sequence
  Description of Artificial Sequence: Synthetic peptide
NTKTRSS

SEQ ID NO: 1070 - protein, 7 aa, Artificial Sequence
  Description of Artificial Sequence: Synthetic peptide
DASNRAT

SEQ ID NO: 1071 - protein, 7 aa, Artificial Sequence
  Description of Artificial Sequence: Synthetic peptide
GASSRAT

SEQ ID NO: 1072 - protein, 7 aa, Artificial Sequence
  Description of Artificial Sequence: Synthetic peptide
AASSLQS

SEQ ID NO: 1073 - protein, 7 aa, Artificial Sequence
  Description of Artificial Sequence: Synthetic peptide
QDSKRPS

SEQ ID NO: 1074 - protein, 7 aa, Artificial Sequence
  Description of Artificial Sequence: Synthetic peptide
FGSNRAS

SEQ ID NO: 1075 - protein, 7 aa, Artificial Sequence
  Description of Artificial Sequence: Synthetic peptide
KASSLES

SEQ ID NO: 1076 - protein, 7 aa, Artificial Sequence
  Description of Artificial Sequence: Synthetic peptide
DVSNRPS

SEQ ID NO: 1077 - protein, 7 aa, Artificial Sequence
  Description of Artificial Sequence: Synthetic peptide
GAFHRAN

SEQ ID NO: 1078 - protein, 11 aa, Artificial Sequence
  Description of Artificial Sequence: Synthetic peptide
IKSDGSHIKGG

SEQ ID NO: 1079 - protein, 7 aa, Artificial Sequence
  Description of Artificial Sequence: Synthetic peptide
RTNTRSS

SEQ ID NO: 1080 - protein, 7 aa, Artificial Sequence
  Description of Artificial Sequence: Synthetic peptide
WASTRTS

SEQ ID NO: 1081 - protein, 7 aa, Artificial Sequence
  Description of Artificial Sequence: Synthetic peptide
SASIRAS

SEQ ID NO: 1082 - protein, 7 aa, Artificial Sequence
  Description of Artificial Sequence: Synthetic peptide
GGSSRAT

SEQ ID NO: 1083 - protein, 7 aa, Artificial Sequence
  Description of Artificial Sequence: Synthetic peptide
GASTRAT

SEQ ID NO: 1084 - protein, 7 aa, Artificial Sequence
  Description of Artificial Sequence: Synthetic peptide
DASNLKS

SEQ ID NO: 1085 - protein, 11 aa, Artificial Sequence
  Description of Artificial Sequence: Synthetic peptide
LNSDGSHTKGD

SEQ ID NO: 1086 - protein, 7 aa, Artificial Sequence
  Description of Artificial Sequence: Synthetic peptide
AKNSRPS

SEQ ID NO: 1087 - protein, 7 aa, Artificial Sequence
  Description of Artificial Sequence: Synthetic peptide
NTNYRHS

SEQ ID NO: 1088 - protein, 7 aa, Artificial Sequence
  Description of Artificial Sequence: Synthetic peptide
GKNSRPS

SEQ ID NO: 1089 - protein, 7 aa, Artificial Sequence
  Description of Artificial Sequence: Synthetic peptide
RDNRRPS

SEQ ID NO: 1090 - protein, 7 aa, Artificial Sequence
  Description of Artificial Sequence: Synthetic peptide
AASTLQS

SEQ ID NO: 1091 - protein, 7 aa, Artificial Sequence
  Description of Artificial Sequence: Synthetic peptide
DASNLET

SEQ ID NO: 1092 - protein, 7 aa, Artificial Sequence
  Description of Artificial Sequence: Synthetic peptide
LGFHRAS

SEQ ID NO: 1093 - protein, 7 aa, Artificial Sequence
  Description of Artificial Sequence: Synthetic peptide
ANNNRPS

SEQ ID NO: 1094 - protein, 7 aa, Artificial Sequence
  Description of Artificial Sequence: Synthetic peptide
DASNRAS

SEQ ID NO: 1095 - protein, 7 aa, Artificial Sequence
  Description of Artificial Sequence: Synthetic peptide
DASSLEN

SEQ ID NO: 1096 - protein, 7 aa, Artificial Sequence
  Description of Artificial Sequence: Synthetic peptide
EVSNRFS

SEQ ID NO: 1097 - protein, 7 aa, Artificial Sequence
  Description of Artificial Sequence: Synthetic peptide
DASILEA

SEQ ID NO: 1098 - protein, 7 aa, Artificial Sequence
  Description of Artificial Sequence: Synthetic peptide
KDTERPS

SEQ ID NO: 1099 - protein, 7 aa, Artificial Sequence
  Description of Artificial Sequence: Synthetic peptide
GASLRAT

SEQ ID NO: 1100 - protein, 7 aa, Artificial Sequence
  Description of Artificial Sequence: Synthetic peptide
KDKERPS

SEQ ID NO: 1101 - protein, 7 aa, Artificial Sequence
  Description of Artificial Sequence: Synthetic peptide
EVTNRPS

SEQ ID NO: 1102 - protein, 7 aa, Artificial Sequence
  Description of Artificial Sequence: Synthetic peptide
EVSNRFS

SEQ ID NO: 1103 - protein, 7 aa, Artificial Sequence
  Description of Artificial Sequence: Synthetic peptide
RNDQRPS

SEQ ID NO: 1104 - protein, 7 aa, Artificial Sequence
  Description of Artificial Sequence: Synthetic peptide
DASSLQS

SEQ ID NO: 1105 - protein, 7 aa, Artificial Sequence
  Description of Artificial Sequence: Synthetic peptide
GASSRAT

SEQ ID NO: 1106 - protein, 7 aa, Artificial Sequence
  Description of Artificial Sequence: Synthetic peptide
GSSIRAT

SEQ ID NO: 1107 - protein, 7 aa, Artificial Sequence
  Description of Artificial Sequence: Synthetic peptide
EDNQRPS

SEQ ID NO: 1108 - protein, 7 aa, Artificial Sequence
  Description of Artificial Sequence: Synthetic peptide
KVSNRDS

SEQ ID NO: 1109 - protein, 7 aa, Artificial Sequence
  Description of Artificial Sequence: Synthetic peptide
GASTRAT

SEQ ID NO: 1110 - protein, 7 aa, Artificial Sequence
  Description of Artificial Sequence: Synthetic peptide
GASSRAT

SEQ ID NO: 1111 - protein, 7 aa, Artificial Sequence
  Description of Artificial Sequence: Synthetic peptide
DDTDRPS

SEQ ID NO: 1112 - protein, 11 aa, Artificial Sequence
  Description of Artificial Sequence: Synthetic peptide
LNSDGSHSKGD

SEQ ID NO: 1113 - protein, 7 aa, Artificial Sequence
  Description of Artificial Sequence: Synthetic peptide
AASSLHS

SEQ ID NO: 1114 - protein, 7 aa, Artificial Sequence
  Description of Artificial Sequence: Synthetic peptide
AASRLQS

SEQ ID NO: 1115 - protein, 7 aa, Artificial Sequence
  Description of Artificial Sequence: Synthetic peptide
DTNTKYS

SEQ ID NO: 1116 - protein, 7 aa, Artificial Sequence
  Description of Artificial Sequence: Synthetic peptide
DVGKRPS

SEQ ID NO: 1117 - protein, 7 aa, Artificial Sequence
  Description of Artificial Sequence: Synthetic peptide
RVSNWDS

SEQ ID NO: 1118 - protein, 7 aa, Artificial Sequence
  Description of Artificial Sequence: Synthetic peptide
DNTNRPS

SEQ ID NO: 1119 - protein, 7 aa, Artificial Sequence
  Description of Artificial Sequence: Synthetic peptide
WASTRES

SEQ ID NO: 1120 - protein, 7 aa, Artificial Sequence
  Description of Artificial Sequence: Synthetic peptide
AASTLQS

SEQ ID NO: 1121 - protein, 7 aa, Artificial Sequence
  Description of Artificial Sequence: Synthetic peptide
EDTKRPS

SEQ ID NO: 1122 - protein, 7 aa, Artificial Sequence
  Description of Artificial Sequence: Synthetic peptide
AASTLQS

SEQ ID NO: 1123 - protein, 7 aa, Artificial Sequence
  Description of Artificial Sequence: Synthetic peptide
GASSRAT

SEQ ID NO: 1124 - protein, 7 aa, Artificial Sequence
  Description of Artificial Sequence: Synthetic peptide
GKNNRPS

SEQ ID NO: 1125 - protein, 7 aa, Artificial Sequence
  Description of Artificial Sequence: Synthetic peptide
AASSLQS

SEQ ID NO: 1126 - protein, 7 aa, Artificial Sequence
  Description of Artificial Sequence: Synthetic peptide
GKNNRPS

SEQ ID NO: 1127 - protein, 7 aa, Artificial Sequence
  Description of Artificial Sequence: Synthetic peptide
GASSRAT

SEQ ID NO: 1128 - protein, 7 aa, Artificial Sequence
  Description of Artificial Sequence: Synthetic peptide
KDTERPS

SEQ ID NO: 1129 - protein, 7 aa, Artificial Sequence
  Description of Artificial Sequence: Synthetic peptide
DASNRAT

SEQ ID NO: 1130 - protein, 7 aa, Artificial Sequence
  Description of Artificial Sequence: Synthetic peptide
DDSDRPS

SEQ ID NO: 1131 - protein, 7 aa, Artificial Sequence
  Description of Artificial Sequence: Synthetic peptide
GASTRAT

SEQ ID NO: 1132 - protein, 7 aa, Artificial Sequence
  Description of Artificial Sequence: Synthetic peptide
DASSLES

SEQ ID NO: 1133 - protein, 7 aa, Artificial Sequence
  Description of Artificial Sequence: Synthetic peptide
DASSLES

SEQ ID NO: 1134 - protein, 7 aa, Artificial Sequence
  Description of Artificial Sequence: Synthetic peptide
AASSLQS

SEQ ID NO: 1135 - protein, 7 aa, Artificial Sequence
  Description of Artificial Sequence: Synthetic peptide
KASSLES

SEQ ID NO: 1136 - protein, 7 aa, Artificial Sequence
  Description of Artificial Sequence: Synthetic peptide
DVSKRPS

SEQ ID NO: 1137 - protein, 7 aa, Artificial Sequence
  Description of Artificial Sequence: Synthetic peptide
GASTRAT

SEQ ID NO: 1138 - protein, 7 aa, Artificial Sequence
  Description of Artificial Sequence: Synthetic peptide
AASTLQS

SEQ ID NO: 1139 - protein, 7 aa, Artificial Sequence
  Description of Artificial Sequence: Synthetic peptide
DVSNRPS

SEQ ID NO: 1140 - protein, 7 aa, Artificial Sequence
  Description of Artificial Sequence: Synthetic peptide
GNSNRPS

SEQ ID NO: 1141 - protein, 7 aa, Artificial Sequence
  Description of Artificial Sequence: Synthetic peptide
KDSERPS

SEQ ID NO: 1142 - protein, 7 aa, Artificial Sequence
  Description of Artificial Sequence: Synthetic peptide
AASSLQS

SEQ ID NO: 1143 - protein, 7 aa, Artificial Sequence
  Description of Artificial Sequence: Synthetic peptide
KASSLES

SEQ ID NO: 1144 - protein, 7 aa, Artificial Sequence
  Description of Artificial Sequence: Synthetic peptide
GNSNRPS

SEQ ID NO: 1145 - protein, 7 aa, Artificial Sequence
  Description of Artificial Sequence: Synthetic peptide
AASSLQS

SEQ ID NO: 1146 - protein, 7 aa, Artificial Sequence
  Description of Artificial Sequence: Synthetic peptide
WASTRES

SEQ ID NO: 1147 - protein, 7 aa, Artificial Sequence
  Description of Artificial Sequence: Synthetic peptide
GASSRAT

SEQ ID NO: 1148 - protein, 7 aa, Artificial Sequence
  Description of Artificial Sequence: Synthetic peptide
QDSKRPS

SEQ ID NO: 1149 - protein, 7 aa, Artificial Sequence
  Description of Artificial Sequence: Synthetic peptide
GKNNRPS

SEQ ID NO: 1150 - protein, 7 aa, Artificial Sequence
  Description of Artificial Sequence: Synthetic peptide
KASSLES

SEQ ID NO: 1151 - protein, 7 aa, Artificial Sequence
  Description of Artificial Sequence: Synthetic peptide
AASSLLS

SEQ ID NO: 1152 - protein, 7 aa, Artificial Sequence
  Description of Artificial Sequence: Synthetic peptide
AASSLQS

SEQ ID NO: 1153 - protein, 7 aa, Artificial Sequence
  Description of Artificial Sequence: Synthetic peptide
DASSLES

SEQ ID NO: 1154 - protein, 7 aa, Artificial Sequence
  Description of Artificial Sequence: Synthetic peptide
EDSKRPS

SEQ ID NO: 1155 - protein, 7 aa, Artificial Sequence
  Description of Artificial Sequence: Synthetic peptide
GASSRAT

SEQ ID NO: 1156 - protein, 7 aa, Artificial Sequence
  Description of Artificial Sequence: Synthetic peptide
DVINRPS

SEQ ID NO: 1157 - protein, 7 aa, Artificial Sequence
  Description of Artificial Sequence: Synthetic peptide
GASSRAT

SEQ ID NO: 1158 - protein, 7 aa, Artificial Sequence
  Description of Artificial Sequence: Synthetic peptide
GKNNRPS

SEQ ID NO: 1159 - protein, 7 aa, Artificial Sequence
  Description of Artificial Sequence: Synthetic peptide
EGSKRPS

SEQ ID NO: 1160 - protein, 7 aa, Artificial Sequence
  Description of Artificial Sequence: Synthetic peptide
GASSRAT

SEQ ID NO: 1161 - protein, 7 aa, Artificial Sequence
  Description of Artificial Sequence: Synthetic peptide
QDSKRPS

SEQ ID NO: 1162 - protein, 7 aa, Artificial Sequence
  Description of Artificial Sequence: Synthetic peptide
QDSKRPS

SEQ ID NO: 1163 - protein, 7 aa, Artificial Sequence
  Description of Artificial Sequence: Synthetic peptide
QDSKRPS

SEQ ID NO: 1164 - protein, 7 aa, Artificial Sequence
  Description of Artificial Sequence: Synthetic peptide
KASSLES

SEQ ID NO: 1165 - protein, 7 aa, Artificial Sequence
  Description of Artificial Sequence: Synthetic peptide
GASSRAT

SEQ ID NO: 1166 - protein, 7 aa, Artificial Sequence
  Description of Artificial Sequence: Synthetic peptide
GNSNRPS

SEQ ID NO: 1167 - protein, 7 aa, Artificial Sequence
  Description of Artificial Sequence: Synthetic peptide
QDSKRPS

SEQ ID NO: 1168 - protein, 7 aa, Artificial Sequence
  Description of Artificial Sequence: Synthetic peptide
GKNNRPS

SEQ ID NO: 1169 - protein, 7 aa, Artificial Sequence
  Description of Artificial Sequence: Synthetic peptide
GASSRAT

SEQ ID NO: 1170 - protein, 7 aa, Artificial Sequence
  Description of Artificial Sequence: Synthetic peptide
EGSKRPS

SEQ ID NO: 1171 - protein, 7 aa, Artificial Sequence
  Description of Artificial Sequence: Synthetic peptide
QDSKRPS

SEQ ID NO: 1172 - protein, 7 aa, Artificial Sequence
  Description of Artificial Sequence: Synthetic peptide
EVSKRPS

SEQ ID NO: 1173 - protein, 7 aa, Artificial Sequence
  Description of Artificial Sequence: Synthetic peptide
QDSKRPS

SEQ ID NO: 1174 - protein, 7 aa, Artificial Sequence
  Description of Artificial Sequence: Synthetic peptide
GNSNRPS

SEQ ID NO: 1175 - protein, 7 aa, Artificial Sequence
  Description of Artificial Sequence: Synthetic peptide
GASTRAT

SEQ ID NO: 1176 - protein, 8 aa, Artificial Sequence
  Description of Artificial Sequence: Synthetic peptide
QQRSNWGT

SEQ ID NO: 1177 - protein, 9 aa, Artificial Sequence
  Description of Artificial Sequence: Synthetic peptide
QQYGSSPWT

SEQ ID NO: 1178 - protein, 11 aa, Artificial Sequence
  Description of Artificial Sequence: Synthetic peptide
GTWDSSLSEWV

SEQ ID NO: 1179 - protein, 11 aa, Artificial Sequence
  Description of Artificial Sequence: Synthetic peptide
QQRSNWPPRLT

SEQ ID NO: 1180 - protein, 9 aa, Artificial Sequence
  Description of Artificial Sequence: Synthetic peptide
QQYYSTPFT

SEQ ID NO: 1181 - protein, 11 aa, Artificial Sequence
  Description of Artificial Sequence: Synthetic peptide
AAWDDSLSGWV

SEQ ID NO: 1182 - protein, 9 aa, Artificial Sequence
  Description of Artificial Sequence: Synthetic peptide
QQLNSYPLT

SEQ ID NO: 1183 - protein, 9 aa, Artificial Sequence
  Description of Artificial Sequence: Synthetic peptide
QAWDSSTVV

SEQ ID NO: 1184 - protein, 11 aa, Artificial Sequence
  Description of Artificial Sequence: Synthetic peptide
QVWDSSSDHYV

SEQ ID NO: 1185 - protein, 9 aa, Artificial Sequence
  Description of Artificial Sequence: Synthetic peptide
QQYGSSPWT

SEQ ID NO: 1186 - protein, 9 aa, Artificial Sequence
  Description of Artificial Sequence: Synthetic peptide
QQYNSYPPT

SEQ ID NO: 1187 - protein, 8 aa, Artificial Sequence
  Description of Artificial Sequence: Synthetic peptide
QQLNSYPT

SEQ ID NO: 1188 - protein, 12 aa, Artificial Sequence
  Description of Artificial Sequence: Synthetic peptide
QSYDSSLSGSGV

SEQ ID NO: 1189 - protein, 9 aa, Artificial Sequence
  Description of Artificial Sequence: Synthetic peptide
QAWDSSIVV

SEQ ID NO: 1190 - protein, 9 aa, Artificial Sequence
  Description of Artificial Sequence: Synthetic peptide
QQYGSSPLT

SEQ ID NO: 1191 - protein, 9 aa, Artificial Sequence
  Description of Artificial Sequence: Synthetic peptide
QQYGSSPLT

SEQ ID NO: 1192 - protein, 11 aa, Artificial Sequence
  Description of Artificial Sequence: Synthetic peptide
NSRDSSGNHGV

SEQ ID NO: 1193 - protein, 9 aa, Artificial Sequence
  Description of Artificial Sequence: Synthetic peptide
QQLNSYPLT

SEQ ID NO: 1194 - protein, 9 aa, Artificial Sequence
  Description of Artificial Sequence: Synthetic peptide
QQYGSSPWT

SEQ ID NO: 1195 - protein, 9 aa, Artificial Sequence
  Description of Artificial Sequence: Synthetic peptide
MQALQTPQT

SEQ ID NO: 1196 - protein, 9 aa, Artificial Sequence
  Description of Artificial Sequence: Synthetic peptide
QLYDRSPPP

SEQ ID NO: 1197 - protein, 10 aa, Artificial Sequence
  Description of Artificial Sequence: Synthetic peptide
QQRSDWPLLT

SEQ ID NO: 1198 - protein, 8 aa, Artificial Sequence
  Description of Artificial Sequence: Synthetic peptide
QQFGTFGT

SEQ ID NO: 1199 - protein, 9 aa, Artificial Sequence
  Description of Artificial Sequence: Synthetic peptide
QQYKTYPFT

SEQ ID NO: 1200 - protein, 9 aa, Artificial Sequence
  Description of Artificial Sequence: Synthetic peptide
QQRSFWPLT

SEQ ID NO: 1201 - protein, 11 aa, Artificial Sequence
  Description of Artificial Sequence: Synthetic peptide
QSFDSSLNVYV

SEQ ID NO: 1202 - protein, 11 aa, Artificial Sequence
  Description of Artificial Sequence: Synthetic peptide
QAWDSSTAWEV

SEQ ID NO: 1203 - protein, 9 aa, Artificial Sequence
  Description of Artificial Sequence: Synthetic peptide
MQALQTPRT

SEQ ID NO: 1204 - protein, 9 aa, Artificial Sequence
  Description of Artificial Sequence: Synthetic peptide
QQSYSTPQT

SEQ ID NO: 1205 - protein, 11 aa, Artificial Sequence
  Description of Artificial Sequence: Synthetic peptide
STWDNSLSAVV

SEQ ID NO: 1206 - protein, 10 aa, Artificial Sequence
  Description of Artificial Sequence: Synthetic peptide
QQYNNWPPIT

SEQ ID NO: 1207 - protein, 12 aa, Artificial Sequence
  Description of Artificial Sequence: Synthetic peptide
NSRDSSDSRNWV

SEQ ID NO: 1208 - protein, 11 aa, Artificial Sequence
  Description of Artificial Sequence: Synthetic peptide
YSTDSSGYHEV

SEQ ID NO: 1209 - protein, 8 aa, Artificial Sequence
  Description of Artificial Sequence: Synthetic peptide
QQSYRSWT

SEQ ID NO: 1210 - protein, 9 aa, Artificial Sequence
  Description of Artificial Sequence: Synthetic peptide
QQYYSYPLT

SEQ ID NO: 1211 - protein, 9 aa, Artificial Sequence
  Description of Artificial Sequence: Synthetic peptide
QQRFDWPLT

SEQ ID NO: 1212 - protein, 11 aa, Artificial Sequence
  Description of Artificial Sequence: Synthetic peptide
FSTDSSGNHGV

SEQ ID NO: 1213 - protein, 12 aa, Artificial Sequence
  Description of Artificial Sequence: Synthetic peptide
QSYDSSLAGSRV

SEQ ID NO: 1214 - protein, 11 aa, Artificial Sequence
  Description of Artificial Sequence: Synthetic peptide
NSRDANTNHVL

SEQ ID NO: 1215 - protein, 10 aa, Artificial Sequence
  Description of Artificial Sequence: Synthetic peptide
QQYGSSPPGT

SEQ ID NO: 1216 - protein, 9 aa, Artificial Sequence
  Description of Artificial Sequence: Synthetic peptide
QQYGSSPFT

SEQ ID NO: 1217 - protein, 13 aa, Artificial Sequence
  Description of Artificial Sequence: Synthetic peptide
TSYTSSSTLEGWV

SEQ ID NO: 1218 - protein, 9 aa, Artificial Sequence
  Description of Artificial Sequence: Synthetic peptide
HQYNSYPFT

SEQ ID NO: 1219 - protein, 12 aa, Artificial Sequence
  Description of Artificial Sequence: Synthetic peptide
NSRDSSGNHLVV

SEQ ID NO: 1220 - protein, 9 aa, Artificial Sequence
  Description of Artificial Sequence: Synthetic peptide
QQYGSSPLT

SEQ ID NO: 1221 - protein, 11 aa, Artificial Sequence
  Description of Artificial Sequence: Synthetic peptide
NSRDSSGNHRV

SEQ ID NO: 1222 - protein, 9 aa, Artificial Sequence
  Description of Artificial Sequence: Synthetic peptide
MQSIQVPIT

SEQ ID NO: 1223 - protein, 9 aa, Artificial Sequence
  Description of Artificial Sequence: Synthetic peptide
QAWDSSTVV

SEQ ID NO: 1224 - protein, 11 aa, Artificial Sequence
  Description of Artificial Sequence: Synthetic peptide
SSYAGSYTYVV

SEQ ID NO: 1225 - protein, 9 aa, Artificial Sequence
  Description of Artificial Sequence: Synthetic peptide
VQGTHWPFT

SEQ ID NO: 1226 - protein, 9 aa, Artificial Sequence
  Description of Artificial Sequence: Synthetic peptide
MQSMEFPWT

SEQ ID NO: 1227 - protein, 9 aa, Artificial Sequence
  Description of Artificial Sequence: Synthetic peptide
QQYGSSPLT

SEQ ID NO: 1228 - protein, 8 aa, Artificial Sequence
  Description of Artificial Sequence: Synthetic peptide
QSYDKGWV

SEQ ID NO: 1229 - protein, 9 aa, Artificial Sequence
  Description of Artificial Sequence: Synthetic peptide
HQYGTSPHT

SEQ ID NO: 1230 - protein, 9 aa, Artificial Sequence
  Description of Artificial Sequence: Synthetic peptide
QQRYNWPLT

SEQ ID NO: 1231 - protein, 11 aa, Artificial Sequence
  Description of Artificial Sequence: Synthetic peptide
VTWDSSLSAGV

SEQ ID NO: 1232 - protein, 9 aa, Artificial Sequence
  Description of Artificial Sequence: Synthetic peptide
QQYNSYPYT

SEQ ID NO: 1233 - protein, 10 aa, Artificial Sequence
  Description of Artificial Sequence: Synthetic peptide
QHYGSSPPYT

SEQ ID NO: 1234 - protein, 9 aa, Artificial Sequence
  Description of Artificial Sequence: Synthetic peptide
LQDSNFPLT

SEQ ID NO: 1235 - protein, 11 aa, Artificial Sequence
  Description of Artificial Sequence: Synthetic peptide
NSRDSSGNHWV

SEQ ID NO: 1236 - protein, 10 aa, Artificial Sequence
  Description of Artificial Sequence: Synthetic peptide
QQYNNWPPYT

SEQ ID NO: 1237 - protein, 10 aa, Artificial Sequence
  Description of Artificial Sequence: Synthetic peptide
SSYTTSRTYV

SEQ ID NO: 1238 - protein, 8 aa, Artificial Sequence
  Description of Artificial Sequence: Synthetic peptide
QQYSTYST

SEQ ID NO: 1239 - protein, 9 aa, Artificial Sequence
  Description of Artificial Sequence: Synthetic peptide
QQYDNWPRT

SEQ ID NO: 1240 - protein, 13 aa, Artificial Sequence
  Description of Artificial Sequence: Synthetic peptide
AAWDDTLSSPNWV

SEQ ID NO: 1241 - protein, 9 aa, Artificial Sequence
  Description of Artificial Sequence: Synthetic peptide
QKYNSAPLT

SEQ ID NO: 1242 - protein, 10 aa, Artificial Sequence
  Description of Artificial Sequence: Synthetic peptide
QQYDSPPPYT

SEQ ID NO: 1243 - protein, 10 aa, Artificial Sequence
  Description of Artificial Sequence: Synthetic peptide
QQYNNWLSYT

SEQ ID NO: 1244 - protein, 10 aa, Artificial Sequence
  Description of Artificial Sequence: Synthetic peptide
SSYTSSSTLI

SEQ ID NO: 1245 - protein, 8 aa, Artificial Sequence
  Description of Artificial Sequence: Synthetic peptide
HQYGSSPT

SEQ ID NO: 1246 - protein, 11 aa, Artificial Sequence
  Description of Artificial Sequence: Synthetic peptide
CSYAGSSSPWV

SEQ ID NO: 1247 - protein, 9 aa, Artificial Sequence
  Description of Artificial Sequence: Synthetic peptide
QQYNNWPRT

SEQ ID NO: 1248 - protein, 9 aa, Artificial Sequence
  Description of Artificial Sequence: Synthetic peptide
QQYHNWPPA

SEQ ID NO: 1249 - protein, 10 aa, Artificial Sequence
  Description of Artificial Sequence: Synthetic peptide
QAWDSRTHVV

SEQ ID NO: 1250 - protein, 11 aa, Artificial Sequence
  Description of Artificial Sequence: Synthetic peptide
QQYGSSPPKYT

SEQ ID NO: 1251 - protein, 9 aa, Artificial Sequence
  Description of Artificial Sequence: Synthetic peptide
QQSYSAPPT

SEQ ID NO: 1252 - protein, 10 aa, Artificial Sequence
  Description of Artificial Sequence: Synthetic peptide
CSYAGSYTLL

SEQ ID NO: 1253 - protein, 13 aa, Artificial Sequence
  Description of Artificial Sequence: Synthetic peptide
GADHGSGGNFVWV

SEQ ID NO: 1254 - protein, 10 aa, Artificial Sequence
  Description of Artificial Sequence: Synthetic peptide
QQYGSSPPYT

SEQ ID NO: 1255 - protein, 9 aa, Artificial Sequence
  Description of Artificial Sequence: Synthetic peptide
QQASSLPYT

SEQ ID NO: 1256 - protein, 11 aa, Artificial Sequence
  Description of Artificial Sequence: Synthetic peptide
NSRDTSGDHRV

SEQ ID NO: 1257 - protein, 11 aa, Artificial Sequence
  Description of Artificial Sequence: Synthetic peptide
QVWDSTGVHVV

SEQ ID NO: 1258 - protein, 9 aa, Artificial Sequence
  Description of Artificial Sequence: Synthetic peptide
QQYDLFPWT

SEQ ID NO: 1259 - protein, 10 aa, Artificial Sequence
  Description of Artificial Sequence: Synthetic peptide
QQYGSSRGIT

SEQ ID NO: 1260 - protein, 9 aa, Artificial Sequence
  Description of Artificial Sequence: Synthetic peptide
MQSIQLPLT

SEQ ID NO: 1261 - protein, 9 aa, Artificial Sequence
  Description of Artificial Sequence: Synthetic peptide
QQSYSIPWT

SEQ ID NO: 1262 - protein, 10 aa, Artificial Sequence
  Description of Artificial Sequence: Synthetic peptide
QQYYDWPPVT

SEQ ID NO: 1263 - protein, 9 aa, Artificial Sequence
  Description of Artificial Sequence: Synthetic peptide
QQANSFPLL

SEQ ID NO: 1264 - protein, 11 aa, Artificial Sequence
  Description of Artificial Sequence: Synthetic peptide
STWDSSLGAVL

SEQ ID NO: 1265 - protein, 12 aa, Artificial Sequence
  Description of Artificial Sequence: Synthetic peptide
HSYDTTLSGQGV

SEQ ID NO: 1266 - protein, 9 aa, Artificial Sequence
  Description of Artificial Sequence: Synthetic peptide
QAWDSSTVV

SEQ ID NO: 1267 - protein, 11 aa, Artificial Sequence
  Description of Artificial Sequence: Synthetic peptide
AAWDDSLSGGV

SEQ ID NO: 1268 - protein, 11 aa, Artificial Sequence
  Description of Artificial Sequence: Synthetic peptide
QSADSSGTFVV

SEQ ID NO: 1269 - protein, 9 aa, Artificial Sequence
  Description of Artificial Sequence: Synthetic peptide
QQYHKTPHT

SEQ ID NO: 1270 - protein, 10 aa, Artificial Sequence
  Description of Artificial Sequence: Synthetic peptide
MQGTHWPPWT

SEQ ID NO: 1271 - protein, 9 aa, Artificial Sequence
  Description of Artificial Sequence: Synthetic peptide
MQATQFPWT

SEQ ID NO: 1272 - protein, 9 aa, Artificial Sequence
  Description of Artificial Sequence: Synthetic peptide
QQSYSTPRT

SEQ ID NO: 1273 - protein, 9 aa, Artificial Sequence
  Description of Artificial Sequence: Synthetic peptide
QQSYSTPRT

SEQ ID NO: 1274 - protein, 10 aa, Artificial Sequence
  Description of Artificial Sequence: Synthetic peptide
QQYNNWPPLT

SEQ ID NO: 1275 - protein, 10 aa, Artificial Sequence
  Description of Artificial Sequence: Synthetic peptide
QQYDNLPPLT

SEQ ID NO: 1276 - protein, 11 aa, Artificial Sequence
  Description of Artificial Sequence: Synthetic peptide
QVWDSSSDPWV

SEQ ID NO: 1277 - protein, 10 aa, Artificial Sequence
  Description of Artificial Sequence: Synthetic peptide
SSYTSSSTRV

SEQ ID NO: 1278 - protein, 9 aa, Artificial Sequence
  Description of Artificial Sequence: Synthetic peptide
SSYTSSSTV

SEQ ID NO: 1279 - protein, 11 aa, Artificial Sequence
  Description of Artificial Sequence: Synthetic peptide
NSRDSSGNHLV

SEQ ID NO: 1280 - protein, 9 aa, Artificial Sequence
  Description of Artificial Sequence: Synthetic peptide
QAWDSSTGV

SEQ ID NO: 1281 - protein, 10 aa, Artificial Sequence
  Description of Artificial Sequence: Synthetic peptide
QQYGSSLTWT

SEQ ID NO: 1282 - protein, 9 aa, Artificial Sequence
  Description of Artificial Sequence: Synthetic peptide
QQYYSTLWT

SEQ ID NO: 1283 - protein, 11 aa, Artificial Sequence
  Description of Artificial Sequence: Synthetic peptide
YSTDSSGNHRV

SEQ ID NO: 1284 - protein, 9 aa, Artificial Sequence
  Description of Artificial Sequence: Synthetic peptide
MQALQTPYT

SEQ ID NO: 1285 - protein, 10 aa, Artificial Sequence
  Description of Artificial Sequence: Synthetic peptide
QSADSSGTWV

SEQ ID NO: 1286 - protein, 10 aa, Artificial Sequence
  Description of Artificial Sequence: Synthetic peptide
MQGTHWPPWT

SEQ ID NO: 1287 - protein, 11 aa, Artificial Sequence
  Description of Artificial Sequence: Synthetic peptide
HSRDSSGNHLV

SEQ ID NO: 1288 - protein, 9 aa, Artificial Sequence
  Description of Artificial Sequence: Synthetic peptide
QQYNSYPWT

SEQ ID NO: 1289 - protein, 9 aa, Artificial Sequence
  Description of Artificial Sequence: Synthetic peptide
QQSYSTPHT

SEQ ID NO: 1290 - protein, 12 aa, Artificial Sequence
  Description of Artificial Sequence: Synthetic peptide
QSADSSGTYSWV

SEQ ID NO: 1291 - protein, 9 aa, Artificial Sequence
  Description of Artificial Sequence: Synthetic peptide
MIWHNSAYF

SEQ ID NO: 1292 - protein, 9 aa, Artificial Sequence
  Description of Artificial Sequence: Synthetic peptide
QAWDSSTGV

SEQ ID NO: 1293 - protein, 9 aa, Artificial Sequence
  Description of Artificial Sequence: Synthetic peptide
QQYDNLPIT

SEQ ID NO: 1294 - protein, 10 aa, Artificial Sequence
  Description of Artificial Sequence: Synthetic peptide
CSYAGSSTWV

SEQ ID NO: 1295 - protein, 9 aa, Artificial Sequence
  Description of Artificial Sequence: Synthetic peptide
QAWDSSTVV

SEQ ID NO: 1296 - protein, 9 aa, Artificial Sequence
  Description of Artificial Sequence: Synthetic peptide
QAWDSSTVV

SEQ ID NO: 1297 - protein, 9 aa, Artificial Sequence
  Description of Artificial Sequence: Synthetic peptide
TQATQFPWT

SEQ ID NO: 1298 - protein, 8 aa, Artificial Sequence
  Description of Artificial Sequence: Synthetic peptide
QQYYSTPR

SEQ ID NO: 1299 - protein, 11 aa, Artificial Sequence
  Description of Artificial Sequence: Synthetic peptide
NSRDSSGDRLV

SEQ ID NO: 1300 - protein, 10 aa, Artificial Sequence
  Description of Artificial Sequence: Synthetic peptide
QAWDSSTAWV

SEQ ID NO: 1301 - protein, 9 aa, Artificial Sequence
  Description of Artificial Sequence: Synthetic peptide
QQYGSSPLT

SEQ ID NO: 1302 - protein, 9 aa, Artificial Sequence
  Description of Artificial Sequence: Synthetic peptide
QQSYSTPRT

SEQ ID NO: 1303 - protein, 9 aa, Artificial Sequence
  Description of Artificial Sequence: Synthetic peptide
QQSYSTPRT

SEQ ID NO: 1304 - protein, 10 aa, Artificial Sequence
  Description of Artificial Sequence: Synthetic peptide
VLYMGSGIWV

SEQ ID NO: 1305 - protein, 10 aa, Artificial Sequence
  Description of Artificial Sequence: Synthetic peptide
QQRSNWPPYT

SEQ ID NO: 1306 - protein, 9 aa, Artificial Sequence
  Description of Artificial Sequence: Synthetic peptide
QQYGSSPLT

SEQ ID NO: 1307 - protein, 9 aa, Artificial Sequence
  Description of Artificial Sequence: Synthetic peptide
QQSYSTPYT

SEQ ID NO: 1308 - protein, 9 aa, Artificial Sequence
  Description of Artificial Sequence: Synthetic peptide
QAWDSSTGV

SEQ ID NO: 1309 - protein, 9 aa, Artificial Sequence
  Description of Artificial Sequence: Synthetic peptide
MQSLQTPVT

SEQ ID NO: 1310 - protein, 9 aa, Artificial Sequence
  Description of Artificial Sequence: Synthetic peptide
QQYNSYSWT

SEQ ID NO: 1311 - protein, 10 aa, Artificial Sequence
  Description of Artificial Sequence: Synthetic peptide
SSYTSSSTVV

SEQ ID NO: 1312 - protein, 9 aa, Artificial Sequence
  Description of Artificial Sequence: Synthetic peptide
QQYNSSPYT

SEQ ID NO: 1313 - protein, 13 aa, Artificial Sequence
  Description of Artificial Sequence: Synthetic peptide
GQSHTNNGQAGVV

SEQ ID NO: 1314 - protein, 11 aa, Artificial Sequence
  Description of Artificial Sequence: Synthetic peptide
ALSMNSGSFWV

SEQ ID NO: 1315 - protein, 9 aa, Artificial Sequence
  Description of Artificial Sequence: Synthetic peptide
QQYYTSPRT

SEQ ID NO: 1316 - protein, 9 aa, Artificial Sequence
  Description of Artificial Sequence: Synthetic peptide
MQGLQTPYT

SEQ ID NO: 1317 - protein, 9 aa, Artificial Sequence
  Description of Artificial Sequence: Synthetic peptide
HQYGTSRYS

SEQ ID NO: 1318 - protein, 9 aa, Artificial Sequence
  Description of Artificial Sequence: Synthetic peptide
QQYDKSPIT

SEQ ID NO: 1319 - protein, 8 aa, Artificial Sequence
  Description of Artificial Sequence: Synthetic peptide
QQYILYWT

SEQ ID NO: 1320 - protein, 9 aa, Artificial Sequence
  Description of Artificial Sequence: Synthetic peptide
QTWGSGIQV

SEQ ID NO: 1321 - protein, 11 aa, Artificial Sequence
  Description of Artificial Sequence: Synthetic peptide
NSRDSSGNYVV

SEQ ID NO: 1322 - protein, 11 aa, Artificial Sequence
  Description of Artificial Sequence: Synthetic peptide
LLYYGGAQPWV

SEQ ID NO: 1323 - protein, 11 aa, Artificial Sequence
  Description of Artificial Sequence: Synthetic peptide
NSRDSSGNSVV

SEQ ID NO: 1324 - protein, 9 aa, Artificial Sequence
  Description of Artificial Sequence: Synthetic peptide
QAWDSTTVI

SEQ ID NO: 1325 - protein, 9 aa, Artificial Sequence
  Description of Artificial Sequence: Synthetic peptide
QQSYSAPFT

SEQ ID NO: 1326 - protein, 9 aa, Artificial Sequence
  Description of Artificial Sequence: Synthetic peptide
QQADNLPYT

SEQ ID NO: 1327 - protein, 9 aa, Artificial Sequence
  Description of Artificial Sequence: Synthetic peptide
VQALQTPLT

SEQ ID NO: 1328 - protein, 12 aa, Artificial Sequence
  Description of Artificial Sequence: Synthetic peptide
QSYDNSLSGSRV

SEQ ID NO: 1329 - protein, 11 aa, Artificial Sequence
  Description of Artificial Sequence: Synthetic peptide
QQRSRGPSGIT

SEQ ID NO: 1330 - protein, 9 aa, Artificial Sequence
  Description of Artificial Sequence: Synthetic peptide
QQFNTYPLT

SEQ ID NO: 1331 - protein, 10 aa, Artificial Sequence
  Description of Artificial Sequence: Synthetic peptide
MQSIELPPLT

SEQ ID NO: 1332 - protein, 10 aa, Artificial Sequence
  Description of Artificial Sequence: Synthetic peptide
QQYDNLAPLT

SEQ ID NO: 1333 - protein, 11 aa, Artificial Sequence
  Description of Artificial Sequence: Synthetic peptide
QSPDSSDTYRV

SEQ ID NO: 1334 - protein, 11 aa, Artificial Sequence
  Description of Artificial Sequence: Synthetic peptide
QQYNNWPPSIT

SEQ ID NO: 1335 - protein, 13 aa, Artificial Sequence
  Description of Artificial Sequence: Synthetic peptide
QSADSSGTYPNWV

SEQ ID NO: 1336 - protein, 11 aa, Artificial Sequence
  Description of Artificial Sequence: Synthetic peptide
SSYTSVSTLML

SEQ ID NO: 1337 - protein, 9 aa, Artificial Sequence
  Description of Artificial Sequence: Synthetic peptide
MQTIQLPIS

SEQ ID NO: 1338 - protein, 11 aa, Artificial Sequence
  Description of Artificial Sequence: Synthetic peptide
TSWDDSLNGPL

SEQ ID NO: 1339 - protein, 9 aa, Artificial Sequence
  Description of Artificial Sequence: Synthetic peptide
QQSFSTLLT

SEQ ID NO: 1340 - protein, 10 aa, Artificial Sequence
  Description of Artificial Sequence: Synthetic peptide
QQYGSSLTWT

SEQ ID NO: 1341 - protein, 11 aa, Artificial Sequence
  Description of Artificial Sequence: Synthetic peptide
QHYGSSPPMYT

SEQ ID NO: 1342 - protein, 11 aa, Artificial Sequence
  Description of Artificial Sequence: Synthetic peptide
QSYDSRNPQWV

SEQ ID NO: 1343 - protein, 9 aa, Artificial Sequence
  Description of Artificial Sequence: Synthetic peptide
MQGTHWPWT

SEQ ID NO: 1344 - protein, 9 aa, Artificial Sequence
  Description of Artificial Sequence: Synthetic peptide
QQYNDWPRT

SEQ ID NO: 1345 - protein, 9 aa, Artificial Sequence
  Description of Artificial Sequence: Synthetic peptide
QQYGVSPNT

SEQ ID NO: 1346 - protein, 11 aa, Artificial Sequence
  Description of Artificial Sequence: Synthetic peptide
QVWDSSSDHVV

SEQ ID NO: 1347 - protein, 10 aa, Artificial Sequence
  Description of Artificial Sequence: Synthetic peptide
QTWGTATPWV

SEQ ID NO: 1348 - protein, 9 aa, Artificial Sequence
  Description of Artificial Sequence: Synthetic peptide
QQTYSAPYT

SEQ ID NO: 1349 - protein, 11 aa, Artificial Sequence
  Description of Artificial Sequence: Synthetic peptide
QQANTFPPALT

SEQ ID NO: 1350 - protein, 9 aa, Artificial Sequence
  Description of Artificial Sequence: Synthetic peptide
LLSYSGARV

SEQ ID NO: 1351 - protein, 11 aa, Artificial Sequence
  Description of Artificial Sequence: Synthetic peptide
CSYAGTHTYIL

SEQ ID NO: 1352 - protein, 9 aa, Artificial Sequence
  Description of Artificial Sequence: Synthetic peptide
MQGTHWPYT

SEQ ID NO: 1353 - protein, 11 aa, Artificial Sequence
  Description of Artificial Sequence: Synthetic peptide
QSYDNSLSGSL

SEQ ID NO: 1354 - protein, 8 aa, Artificial Sequence
  Description of Artificial Sequence: Synthetic peptide
QQYYSSVT

SEQ ID NO: 1355 - protein, 9 aa, Artificial Sequence
  Description of Artificial Sequence: Synthetic peptide
QKYNSAPFT

SEQ ID NO: 1356 - protein, 11 aa, Artificial Sequence
  Description of Artificial Sequence: Synthetic peptide
YSTDSSGNHRV

SEQ ID NO: 1357 - protein, 9 aa, Artificial Sequence
  Description of Artificial Sequence: Synthetic peptide
QQLNSYPRT

SEQ ID NO: 1358 - protein, 9 aa, Artificial Sequence
  Description of Artificial Sequence: Synthetic peptide
QQYGSSPLT

SEQ ID NO: 1359 - protein, 11 aa, Artificial Sequence
  Description of Artificial Sequence: Synthetic peptide
NSRDSSGNHLV

SEQ ID NO: 1360 - protein, 9 aa, Artificial Sequence
  Description of Artificial Sequence: Synthetic peptide
QQSYSTPLT

SEQ ID NO: 1361 - protein, 11 aa, Artificial Sequence
  Description of Artificial Sequence: Synthetic peptide
NSRDSSGNHWV

SEQ ID NO: 1362 - protein, 9 aa, Artificial Sequence
  Description of Artificial Sequence: Synthetic peptide
QQYGSSPLT

SEQ ID NO: 1363 - protein, 11 aa, Artificial Sequence
  Description of Artificial Sequence: Synthetic peptide
QSADSSGSSVV

SEQ ID NO: 1364 - protein, 8 aa, Artificial Sequence
  Description of Artificial Sequence: Synthetic peptide
QQRSKGIT

SEQ ID NO: 1365 - protein, 13 aa, Artificial Sequence
  Description of Artificial Sequence: Synthetic peptide
QVWDSSTDHPGVV

SEQ ID NO: 1366 - protein, 10 aa, Artificial Sequence
  Description of Artificial Sequence: Synthetic peptide
QQYNNWPPYT

SEQ ID NO: 1367 - protein, 9 aa, Artificial Sequence
  Description of Artificial Sequence: Synthetic peptide
QQYNSYSRT

SEQ ID NO: 1368 - protein, 9 aa, Artificial Sequence
  Description of Artificial Sequence: Synthetic peptide
QQYNSYSGT

SEQ ID NO: 1369 - protein, 9 aa, Artificial Sequence
  Description of Artificial Sequence: Synthetic peptide
QQSYSHPLT

SEQ ID NO: 1370 - protein, 10 aa, Artificial Sequence
  Description of Artificial Sequence: Synthetic peptide
QQYNSYSQYT

SEQ ID NO: 1371 - protein, 10 aa, Artificial Sequence
  Description of Artificial Sequence: Synthetic peptide
SSYAGSNNWV

SEQ ID NO: 1372 - protein, 10 aa, Artificial Sequence [sequence omitted]

SEQ ID NO: 1373 - protein, 9 aa, Artificial Sequence
  Description of Artificial Sequence: Synthetic peptide
QQLNSYPIT

SEQ ID NO: 1374 - protein, 11 aa, Artificial Sequence
  Description of Artificial Sequence: Synthetic peptide
SSYTSSSTLVV

SEQ ID NO: 1375 - protein, 11 aa, Artificial Sequence
  Description of Artificial Sequence: Synthetic peptide
QSYDSSLSDVV

SEQ ID NO: 1376 - protein, 12 aa, Artificial Sequence
  Description of Artificial Sequence: Synthetic peptide
QSADSSGTYPVV

SEQ ID NO: 1377 - protein, 10 aa, Artificial Sequence
  Description of Artificial Sequence: Synthetic peptide
QQSYSTPLIT

SEQ ID NO: 1378 - protein, 9 aa, Artificial Sequence
  Description of Artificial Sequence: Synthetic peptide
QQYNSYQGT

SEQ ID NO: 1379 - protein, 11 aa, Artificial Sequence
  Description of Artificial Sequence: Synthetic peptide
QSYDSSLSGYV

SEQ ID NO: 1380 - protein, 9 aa, Artificial Sequence
  Description of Artificial Sequence: Synthetic peptide
QQSYSTPLT

SEQ ID NO: 1381 - protein, 9 aa, Artificial Sequence
  Description of Artificial Sequence: Synthetic peptide
QQYYSTPLT

SEQ ID NO: 1382 - protein, 9 aa, Artificial Sequence
  Description of Artificial Sequence: Synthetic peptide
QQYGSSPRT

SEQ ID NO: 1383 - protein, 10 aa, Artificial Sequence
  Description of Artificial Sequence: Synthetic peptide
QAWDSSTAWV

SEQ ID NO: 1384 - protein, 11 aa, Artificial Sequence
  Description of Artificial Sequence: Synthetic peptide
NSRDSSGNRWV

SEQ ID NO: 1385 - protein, 11 aa, Artificial Sequence
  Description of Artificial Sequence: Synthetic peptide
QQYNSYSRAWT

SEQ ID NO: 1386 - protein, 9 aa, Artificial Sequence
  Description of Artificial Sequence: Synthetic peptide
QQYNSYPYT

SEQ ID NO: 1387 - protein, 9 aa, Artificial Sequence
  Description of Artificial Sequence: Synthetic peptide
QQSYSFPYT

SEQ ID NO: 1388 - protein, 9 aa, Artificial Sequence
  Description of Artificial Sequence: Synthetic peptide
QQYNSYTWT

SEQ ID NO: 1389 - protein, 11 aa, Artificial Sequence
  Description of Artificial Sequence: Synthetic peptide
YSTDSSGNHYV

SEQ ID NO: 1390 - protein, 9 aa, Artificial Sequence
  Description of Artificial Sequence: Synthetic peptide
QQYGSSPYT

SEQ ID NO: 1391 - protein, 10 aa, Artificial Sequence
  Description of Artificial Sequence: Synthetic peptide
SSYTSSSTVV

SEQ ID NO: 1392 - protein, 9 aa, Artificial Sequence
  Description of Artificial Sequence: Synthetic peptide
QQYGSSPLT

SEQ ID NO: 1393 - protein, 11 aa, Artificial Sequence
  Description of Artificial Sequence: Synthetic peptide
NSRDSSGNHRV

SEQ ID NO: 1394 - protein, 8 aa, Artificial Sequence
  Description of Artificial Sequence: Synthetic peptide
CSYAGSAV

SEQ ID NO: 1395 - protein, 10 aa, Artificial Sequence
  Description of Artificial Sequence: Synthetic peptide
QQYGSSPAYT

SEQ ID NO: 1396 - protein, 9 aa, Artificial Sequence
  Description of Artificial Sequence: Synthetic peptide
QAWDSSSVV

SEQ ID NO: 1397 - protein, 9 aa, Artificial Sequence
  Description of Artificial Sequence: Synthetic peptide
QAWDSSTLV

SEQ ID NO: 1398 - protein, 9 aa, Artificial Sequence
  Description of Artificial Sequence: Synthetic peptide
QAWDSSIVV

SEQ ID NO: 1399 - protein, 8 aa, Artificial Sequence
  Description of Artificial Sequence: Synthetic peptide
QQYNSYAT

SEQ ID NO: 1400 - protein, 9 aa, Artificial Sequence
  Description of Artificial Sequence: Synthetic peptide
QQYGSSPWT

SEQ ID NO: 1401 - protein, 12 aa, Artificial Sequence
  Description of Artificial Sequence: Synthetic peptide
QSYDSSLSARYV

SEQ ID NO: 1402 - protein, 9 aa, Artificial Sequence
  Description of Artificial Sequence: Synthetic peptide
QAWDSSTAV

SEQ ID NO: 1403 - protein, 10 aa, Artificial Sequence
  Description of Artificial Sequence: Synthetic peptide
NSRDSSGNHL

SEQ ID NO: 1404 - protein, 8 aa, Artificial Sequence
  Description of Artificial Sequence: Synthetic peptide
QQYGSSQT

SEQ ID NO: 1405 - protein, 8 aa, Artificial Sequence
  Description of Artificial Sequence: Synthetic peptide
CSYAGSVV

SEQ ID NO: 1406 - protein, 10 aa, Artificial Sequence
  Description of Artificial Sequence: Synthetic peptide
QAWDSSTAWV

SEQ ID NO: 1407 - protein, 10 aa, Artificial Sequence
  Description of Artificial Sequence: Synthetic peptide
SSYAGSNNVV

SEQ ID NO: 1408 - protein, 10 aa, Artificial Sequence
  Description of Artificial Sequence: Synthetic peptide
QAWDSSIHVV

SEQ ID NO: 1409 - protein, 11 aa, Artificial Sequence
  Description of Artificial Sequence: Synthetic peptide
QSYDSSLSDVV

SEQ ID NO: 1410 - protein, 9 aa, Artificial Sequence
  Description of Artificial Sequence: Synthetic peptide
QQYNNWPRT

SEQ ID NO: 1411 - protein, 130 aa, Artificial Sequence
  Description of Artificial Sequence: Synthetic polypeptide
QVQLVQSGAEVKKPGASVKVSCKASGYTFTSYGISWVRQAPGQGLEWMGWISAYNGNTNYAQKLQGRVTMTTDTSTSTAYMELRSLRSDDTAVYYCAREGDCSGGSCYSGYYYYYGMDVWGQGTTVTVSS

SEQ ID NO: 1412 - protein, 123 aa, Artificial Sequence
  Description of Artificial Sequence: Synthetic polypeptide
QMQLVQSGPEVKKPGTSVKVSCKASGFTFTSSAMQWVRQARGQRLEWIGWIVVGSGNTNYAQKFQERVTITRDMSTSTAYMELSSLRSEDTAVYYCAVNYCSSTSCYDAFDIWGQGTMVTVSS

SEQ ID NO: 1413 - protein, 126 aa, Artificial Sequence
  Description of Artificial Sequence: Synthetic polypeptide
QVQLVQSGAEVKKPGASVKVSCKVSGYTLTELSMHWVRQAPGKGLEWMGGFDPEDGETIYAQKFQGRVTMTEDTSTDTAYMELSSLRSEDTAVYYCATAPPYCSSTSCPINWFDPWGQGTLVTVSS

SEQ ID NO: 1414 - protein, 122 aa, Artificial Sequence
  Description of Artificial Sequence: Synthetic polypeptide
QVQLVQSGAEVKKPGSSVKVSCKASGGTFSSYAISWVRQAPGQGLEWMGGIIPIFGTANYAQKFQGRVTITTDESTSTAYMELSSLRSEDTAVYYCARVGVYDSSGYYFDYWGQGTLVTVSS

SEQ ID NO: 1415 - protein, 120 aa, Artificial Sequence
  Description of Artificial Sequence: Synthetic polypeptide
QVTLRESGPALVKPTQTLTLTCTFSGFSLSTSGMRVSWIRQPPGKALEWLARIDWDDDKFYSTSLKTRLTISKDTSKNQVVLTMTNMDPVDTATYYCARSYSSSLPFDYWGQGTLVTVSS

SEQ ID NO: 1416 - protein, 125 aa, Artificial Sequence
  Description of Artificial Sequence: Synthetic polypeptide
QVTLRESGPALVKPTQTLTLTCTFSGFSLSTSGMRVSWIRQPPGKALEWLARIDWDDDKFYSTSLKTRLTISKDTSKNQVVLTMTNMDPVDTATYYCARSNYDILTGRLDAFDIWGQGTMVTVSS

SEQ ID NO: 1417 - protein, 123 aa, Artificial Sequence
  Description of Artificial Sequence: Synthetic polypeptide
EVQLLESGGGLVQPGGSLRLSCAASGFTFSSYAMSWVRQAPGKGLEWVSAISGSGGSTYYADSVKGRFTISRDNSKNTLYLQMNSLRAEDTAVYYCAKDRNYDFWSGYYFDYWGQGTLVTVSS

SEQ ID NO: 1418 - protein, 117 aa, Artificial Sequence
  Description of Artificial Sequence: Synthetic polypeptide
QVQLVESGGGVVQPGRSLRLSCAASGFTFSSYAMHWVRQAPGKGLEWVAVISYDGSNKYYADSVKGRFTISRDNSKNTLYLQMNSLRAEDTAVYYCARDGGGLLLNWGQGTLVTVSS

SEQ ID NO: 1419 - protein, 118 aa, Artificial Sequence
  Description of Artificial Sequence: Synthetic polypeptide
QVQLVESGGGVVQPGRSLRLSCAASGFTFSSYAMHWVRQAPGKGLEWVAVISYDGSNKYYADSVKGRFTISRDNSKNTLYLQMNSLRAEDTAVYYCARDGSSWYIDYWGQGTLVTVSS

SEQ ID NO: 1420 - protein, 121 aa, Artificial Sequence
  Description of Artificial Sequence: Synthetic polypeptide
QVQLVESGGGVVQPGRSLRLSCAASGFTFSSYAMHWVRQAPGKGLEWVAVISYDGSNKYYADSVKGRFTISRDNSKNTLYLQMNSLRAEDTAVYYCARPRGGSYYSAFDIWGQGTMVTVSS

SEQ ID NO: 1421 - protein, 122 aa, Artificial Sequence
  Description of Artificial Sequence: Synthetic polypeptide
QVQLVESGGGVVQPGRSLRLSCAASGFTFSSYGMHWVRQAPGKGLEWVAVISYDGSNKYYADSVKGRFTISRDNSKNTLYLQMNSLRAEDTAVYYCAKSRGGGYYYYYMDVWGKGTTVTVSS

SEQ ID NO: 1422 - protein, 117 aa, Artificial Sequence
  Description of Artificial Sequence: Synthetic polypeptide
EVQLVETGGGLIQPGGSLRLSCAASGFTVSSNYMSWVRQAPGKGLEWVSVIYSGGSTYYADSVKGRFTISRDNSKNTLYLQMNSLRAEDTAVYYCARDLYYYGMDVWGQGTTVTVSS

SEQ ID NO: 1423 - protein, 119 aa, Artificial Sequence
  Description of Artificial Sequence: Synthetic polypeptide
EVQLVESGGGLIQPGGSLRLSCAASGFTVSSNYMSWVRQAPGKGLEWVSVIYSGGSTYYADSVKGRFTISRDNSKNTLYLQMNSLRAEDTAVYYCARILPLNWYYFDYWGQGTLVTVSS

SEQ ID NO: 1424 - protein, 120 aa, Artificial Sequence
  Description of Artificial Sequence: Synthetic polypeptide
EVQLVESGGGLIQPGGSLRLSCAASGFTVSSNYMSWVRQAPGKGLEWVSVIYSGGSTYYADSVKGRFTISRDNSKNTLYLQMNSLRAEDTAVYYCATSSFDYYYYFMDVWGKGTTVTVSS

SEQ ID NO: 1425 - protein, 124 aa, Artificial Sequence
  Description of Artificial Sequence: Synthetic polypeptide
QVQLQESGPGLVKPSQTLSLTCTVSGGSISSGGYYWSWIRQHPGKGLEWIGYIYYSGSTYYNPSLKSRVTISVDTSKNQFSLKLSSVTAADTAVYYCARAPTIFGVVIGWFDPWGQGTLVTVSS

SEQ ID NO: 1426 - protein, 125 aa, Artificial Sequence
  Description of Artificial Sequence: Synthetic polypeptide
QVQLQESGPGLVKPSQTLSLTCTVSGGSISSGGYYWSWIRQHPGKGLEWIGYIYYSGSTYYNPSLKSRVTISVDTSKNQFSLKLSSVTAADTAVYYCARAPRITIFGVVSPFDYWGQGTLVTVSS

SEQ ID NO: 1427 - protein, 129 aa, Artificial Sequence
  Description of Artificial Sequence: Synthetic polypeptide
QVQLQESGPGLVKPSQTLSLTCTVSGGSISSGDYYWSWICQAEAKGLEWIGYIYYSGSTYYNPSLKSRVTISVDTSKNQFSLKLSSVTAADTAVYYCAREGRFLEWLLSVNYYYYMDVWGKGTTVTVSS

SEQ ID NO: 1428 - protein, 124 aa, Artificial Sequence
  Description of Artificial Sequence: Synthetic polypeptide
QLQLQESGPGLVKPSETLSLTCTVSGGSISSSSYYWGWIRQPPGKGLEWIGSIYYSGSTYYNPSLKSRVTISVDTSKNQFSLKLSSVTAADTAVYYCARTRITIFGGERYFDLWGRGTLVTVSS

SEQ ID NO: 1429 - protein, 112 aa, Artificial Sequence
  Description of Artificial Sequence: Synthetic polypeptide
QVQLQESGPGLVKPSETLSLTCTVSGGSISSYYWSWIRQPPGKGLEWIGYIYYSGSTNYNPSLKSRVTISVDTSKNQFSLKLSSVTAADTAVYYCARGFDYWGQGTLVTVSS

SEQ ID NO: 1430 - protein, 121 aa, Artificial Sequence
  Description of Artificial Sequence: Synthetic polypeptide
EVQLVQSGAEVKKPGESLKISCKGSGYSFTSYWIGWVRQLPGKGLEWMGIIYPGDSDTRYSPSFQGQVTISADKSISTAYLQWSSLKASDTAMYYCARRGFGLTYYGMDVWGQGTTVTVSS

SEQ ID NO: 1431 - protein, 122 aa, Artificial Sequence
  Description of Artificial Sequence: Synthetic polypeptide
DVQLVESGGGLVQPGGSLRLSCIASGFAFSDHHMDWVRQAPGKGLEWVGRIRDKADSYTTEYAASVRGRFTISRDDLKNSQYLQMNSLKTEDTAMYYCASSHSRGYYAFDYWGQGALVTVSS

SEQ ID NO: 1432 - protein, 124 aa, Artificial Sequence
  Description of Artificial Sequence: Synthetic polypeptide
EVHLLESGGGLVQPGGSLRLSCAASGFTFTTYAMFWVRQAPGKGLEWVSAINAGGAKTHYADSVRGRFTISRDNSKSTLYLHMDRLRVGDTAIYYCAKVPSYIYDSRDDYLDFWGQGTLVTVSS

SEQ ID NO: 1433 - protein, 123 aa, Artificial Sequence
  Description of Artificial Sequence: Synthetic polypeptide
EVQLVDSGGGLVQPGGALRLSCVVSGFTVRYNYMSWVRQAPGKGLEWVSIIYRGDRGGSTYYIDSVKGRFIISRDDSRNTVYLQMNSLSAEDTAVYYCASSHSADYLGPFDYWGRGTLVTVSS

SEQ ID NO: 1434 - protein, 123 aa, Artificial Sequence
  Description of Artificial Sequence: Synthetic polypeptide
QAQLVESGGGVVQPGRSLRLSCAASGFNFNNYGMHWVRLAAGKGLEWVAFISYEGSITHYADSVKGRFTVSRDFSKNTLYLQMNRLTTGDTAVYYCAKRREVLHLWRDEMDVWGQGTTVTVSS

SEQ ID NO: 1435 - protein, 118 aa, Artificial Sequence
  Description of Artificial Sequence: Synthetic polypeptide
EVRLLDSGGGLVQPGGSLRLSCVASGFTLSTYSVTWYRQAPGKGPEWVAVFSATGGTTDYADSVRGRFTFSRDNSENTLYVQMTSLRADDTAFYYCVKYLQSGDEGYWGPGTLVTVSS

SEQ ID NO: 1436 - protein, 119 aa, Artificial Sequence
  Description of Artificial Sequence: Synthetic polypeptide
QVQLVESGGGVVQPGRSLRLSCAASGFTFSSYAMHWVRQAPGKGLEWVAILWPDGGKKYFADSVKGRFTISRDNSKNTLFLQMSSLRAEDTATYYCARDPASGWGLDPWGQGTLVTVSS

SEQ ID NO: 1437 - protein, 126 aa, Artificial Sequence
  Description of Artificial Sequence: Synthetic polypeptide
QVQLVQSGAEVKKPGASVKVSCKASGYTFTSYDINWVRQATGQGLEWMGWMNPNSGNTGYAQKFQGRVTMTRNTSISTAYMELSSLRSEDTAVYYCARAAKRITIFGTRGYYFDYWGQGTLVTVSS

SEQ ID NO: 1438 - protein, 121 aa, Artificial Sequence
  Description of Artificial Sequence: Synthetic polypeptide
QVQLVQSGAEVKKPGASVKVSCKASGYTFTSYGISWVRQAPGQGLEWMGWISAYSGNTNYAQKLQGRVTMTTDTSTSTTYMELRSLRSDDTAVYYCARDSSSWPYVSLGYWGQGTLVTVSS

SEQ ID NO: 1439 - protein, 123 aa, Artificial Sequence
  Description of Artificial Sequence: Synthetic polypeptide
QVQLQESGPGLVKPSETLSLTCTVSGGSISSHYWSWIRQPPGKGLEWIGYIYYSGSTNYNPSLKSRVTISVDTSKNQFSLKLSSVTAADTAVYYCARIPRGWLQSPSYYFDYWGQGTLVTVSS

SEQ ID NO: 1440 - protein, 118 aa, Artificial Sequence
  Description of Artificial Sequence: Synthetic polypeptide
QVQLVQSGAEVKKPGASVKVSCKASGYTFSNYYMHWVRQAPGQGLEWMGIIKPSAGRTIYAQKFVGRVTMTRDTSTSTVYMELSSLRSDDTAVYYCARGGGPTDRDYWGPGTLVAVSS

SEQ ID NO: 1441 - protein, 124 aa, Artificial Sequence
  Description of Artificial Sequence: Synthetic polypeptide
EVQLVESGGGLVKPGGSLRLSCAASGFTFSSYRMNWVRQAPGKGLEWVSSISSSSSYIYYANSVKGRFTISRDNAKNSLYLQMNSLRAEDTAVYYCARVVWQLVENYYYYMDVWGKGTTVTVSS

SEQ ID NO: 1442 - protein, 125 aa, Artificial Sequence
  Description of Artificial Sequence: Synthetic polypeptide
QVQLQQWGAGLLKPSETLSLTCAVYGGSFTNYYWNWIRQPPGRGLEWIGEINHSGSTNYKPSLKSRVTISIDTSKNQFSLKLSSVTAADTAVYFCARRLGYDNGWGTYFYGLDVWGQGTTVTVTS

SEQ ID NO: 1443 - protein, 125 aa, Artificial Sequence
  Description of Artificial Sequence: Synthetic polypeptide
QLQLQESGPGLVKPSETLSLICNVSGGSIISTSHYWGWIRQPPGKGLEWIGTIYYSGNTYYNPSLTSRATMSVDTSKNHFSLNLSSVTAADTAVYFCARRSRAVAGKYYWYYDLWGRGALVSVSS

SEQ ID NO: 1444 - protein, 121 aa, Artificial Sequence
  Description of Artificial Sequence: Synthetic polypeptide
EMELVESGGGLVQPGGSLRLSCAASGFTFSTYWMTWLRQTPGKGLDWVANIKPDESEIHYVDSVKGRFTVSRDNAKNSVYLHMNSLRAEDTAVYYCARLRAVGGDDTFDVWGQGTMVTVSS

SEQ ID NO: 1445 - protein, 122 aa, Artificial Sequence
  Description of Artificial Sequence: Synthetic polypeptide
EVQLVESGGGLVQPGGSLRLSCAASGFTFSDYAMTWVRQTPGKGLEWISAITENGFTTYYADSMRGRFTISRDNSKNTLYLQMSSLRAEDTAVYYCAKYWSLSGPTELLDSWGQGTLVTVSS

SEQ ID NO: 1446 - protein, 117 aa, Artificial Sequence
  Description of Artificial Sequence: Synthetic polypeptide
EVQLLESGGNLVQPGGSLRLSCAASGFTFSSYSMSWFRQAPGKGLEWVSVIDNRGGNIHYSDSVRVRFTISRDNSKNTLYLQMSSLRAEDTAIYYCAQYVQEGMDVWGPGTTVTVSS

SEQ ID NO: 1447 - protein, 123 aa, Artificial Sequence
  Description of Artificial Sequence: Synthetic polypeptide
QVQLVQSGAEVKKPGASVKVPCKASGYTFTSYQMHWVRRAPGQGLEWMGLIDPDTGGTRYTQNFQGRVTMTRDTSTTTVYMELNSLTSGDTAVYYCARGGRVGATYPYNMDVWGKGTTVTVSS

SEQ ID NO: 1448 - protein, 125 aa, Artificial Sequence
  Description of Artificial Sequence: Synthetic polypeptide
QVQLQESCPGLAKPSQTLSLTCTVSGGSISGRGYFWTWIRQPAGKGLEWIGDISSSGSTNYNPFLKSRVSVSLDASKNTFSLNLRSVTAADTAVYFCARDRRLYGDFYYYGMDVWGQGTTVTVSS

SEQ ID NO: 1449 - protein, 129 aa, Artificial Sequence
  Description of Artificial Sequence: Synthetic polypeptide
EVQLVESGGGTVQPGGSLRLSCAGSGFSFNSYWMSWVRQAPGKGLEWVASIKQDGSETYYVDSVKGRVSISRDNTKRSLFLQMNSLRADDTAVYYCARGVDGISTIVVLVFWNWYFDLWGRGTLVTVSS

SEQ ID NO: 1450 - protein, 124 aa, Artificial Sequence
  Description of Artificial Sequence: Synthetic polypeptide
QVQLQESGPGLVKPSGTLSLTCTVSVGSISSHYWSWIRQPPGKGLEWIGYIYYSGSTNYNPSLKSRVTISVDTSKNQFSLKLSSVTAADTAVYYCARSGRGWLQLNPSYYFDYWGQGTLVTVSS

SEQ ID NO: 1451 - protein, 120 aa, Artificial Sequence
  Description of Artificial Sequence: Synthetic polypeptide
EVQLLESGGGLVQPGGSLRLSCAASGFTFSSYAMSWVRQAPGKGLEWVSAISGSGTSTYYADSVKGRFTISRDNSKNTLYLQMNSLRAEDTAVYYCAKGYPRYYYGMDVWGQGTTVTVSS

SEQ ID NO: 1452 - protein, 126 aa, Artificial Sequence
  Description of Artificial Sequence: Synthetic polypeptide
QVQLVQSGAEVKKPGASVKVSCKASGYTFTSYDINWVRQATGQGLEWMGWMNPNSGNTGYAQKFQGRVTMTRNTSISTAYMELSSLRSEDTAVYYCARRRAATWSIYYYYYYMDVWGKGTTVTVSS

SEQ ID NO: 1453 - protein, 121 aa, Artificial Sequence
  Description of Artificial Sequence: Synthetic polypeptide
EVQLVESGGGLVQPGGSLRLSCAASGFIFSNYWMSWVRQAPGKGLEWVANIKQDGGEQYYVDSVKGRFTISRDNGKNSLYLQLNSLRADDTAVYYCARSTYLPAAGTMNFWGRGTLVTVSS

SEQ ID NO: 1454 - protein, 130 aa, Artificial Sequence
  Description of Artificial Sequence: Synthetic polypeptide
QVQLQQWGAGLLKPSETLSLTCAVYGGSFSGYYWSWIRQPPGKGLEWIGEINHSGSTNYNPSLKSRVTISVDTSKNQFSLKLSSVTAADTAVYYCARGNIVVVPAAMGVFLYYYYSMDVWGKGTTVTVSS

SEQ ID NO: 1455 - protein, 125 aa, Artificial Sequence
  Description of Artificial Sequence: Synthetic polypeptide
QVQLQESGPGLVKPSETLSLTCTVSGGSISSHYWSWIRQPPGKGLEWIGYIYYSGSTNYNPSLKSRVTMSVDTSKNQFSLKLSSVTAADTAVYYCARGERQWLQLYSYYGMDVWGQGTTVTVSSA

SEQ ID NO: 1456 - protein, 125 aa, Artificial Sequence
  Description of Artificial Sequence: Synthetic polypeptide
QVQLVQSGAEVKKPGASVKVSCKASGYTFTSYGISWVRQAPGQGLEWMGWISAYNGNTNYAQKLQGRVTMTTDTSTSTAYMELRSLRSDDTAVYYCARDVRMITFGGVIVYFDYWGQGTLVTVSS

SEQ ID NO: 1457 - protein, 113 aa, Artificial Sequence
  Description of Artificial Sequence: Synthetic polypeptide
EVQLVESGGGLVQPGGSLRLSCAASGFTFSNYWMHWVRQVPGKGLVWVSSINNDGSNTRYADSVKGRFTISRDNAKNTVYMQMNSLRAEDTAVYYCARPWGYWGQGTLVTVSS

SEQ ID NO: 1458 - protein, 126 aa, Artificial Sequence
  Description of Artificial Sequence: Synthetic polypeptide
QVQLVQSGAEVKKPGASVKVSCKASGYTFTSYDINWVRQATGQGLEWMGWMNPNSGNTGYAQKFQGRVTMTRNTSISTAYMELSSLRSEDTAVYYCARGMKVVTIFGRREYYFDYWGQGTLVTVSS

SEQ ID NO: 1459 - protein, 124 aa, Artificial Sequence
  Description of Artificial Sequence: Synthetic polypeptide
QLQLLESGPGRVKPSETLSLTCSVSGAFISTSNSFWGWIRQPPGKGLEWIGSENYGGSSYFNPSLKRRVAISVDTSKNQFSLKLRSVTAADTAIYYCARRPSLGFGSSWNFDLWGRGTLVTVSS

SEQ ID NO: 1460 - protein, 113 aa, Artificial Sequence
  Description of Artificial Sequence: Synthetic polypeptide
EVQLVESGGGLVQTGGSLRLSCRGSGFSFSNDWLSWVRQAPGKGLEWVANINQDGSEKYSVDSVKGRFTISRDNAKISLYLQMNSLRAEDTAVYYCVRDAGGWGQGTLVTVSS

SEQ ID NO: 1461 - protein, 122 aa, Artificial Sequence
  Description of Artificial Sequence: Synthetic polypeptide
QVQLVQSGAEVKKPGSSVKVSCKASGGTLSRCVITWVRQAPGQGLEWMGRIIPIFGTVNYAQKFQGRVTIGADESTSTAYMELSRLRSEDTAVYYCANTDIGDVRFYGMDVWGQGTTVTVSS

SEQ ID NO: 1462 - protein, 129 aa, Artificial Sequence
  Description of Artificial Sequence: Synthetic polypeptide
QVQLQESGPGLVKPSQTLSLTCTVSGGSISDGDYYWSWIRQPPGKGLEWIAYISYSGSTYYNPSLKSRVALSVDTSKNQFSLNLNSVTAADTAVYYCARIRGERITIFAVLVTGAFDVWGQGTLVTVSA

SEQ ID NO: 1463 - protein, 121 aa, Artificial Sequence
  Description of Artificial Sequence: Synthetic polypeptide
QLQLQESGPGLVRPSETLSLTCSVSGDSISGTKNYWAWIRQPPGKGLEWIGSFYYNWGSTSYNASLKSRVSISVDTSRNQLSLKLTSVSAADTAVYYCARRLEPRHYFDTWGRGSLVTVSS

SEQ ID NO: 1464 - protein, 122 aa, Artificial Sequence
  Description of Artificial Sequence: Synthetic polypeptide
QVHLVQSGAEVKKPGASVRVSCKVSGYSLSLLTMYWVRQAPGKGLEWMGSFDPQDGETMYAQKFQGRVTMTEDTSADTAYMELSGLRSEDTAVYYCATDDVSLVVIYALAIWGQGTLVTVSS

SEQ ID NO: 1465 - protein, 116 aa, Artificial Sequence
  Description of Artificial Sequence: Synthetic polypeptide
EVQLFQSGGGLVQPGGSLRLSCKASGFTFSDYDISWVRQAPGKGLEWVSHITLTGRTYYVDSVQGRFTISRDNSKDTVYLQMNGLRADDTAVYYCAKHLIRAYDYWGQGALVTVSS

SEQ ID NO: 1466 - protein, 123 aa, Artificial Sequence
  Description of Artificial Sequence: Synthetic polypeptide
QVQLVESGGGVVQPGRSLRLSCAASGFTFNNYGMHWVRQAPGKGLEWVALISYEGSLKYYGDSVRGRFTVSRDNSRNTLYLQMNSLRVDDTAVYYCAKAGGIFAIHYYGMNVWGQGTTVTVSS

SEQ ID NO: 1467 - protein, 126 aa, Artificial Sequence
  Description of Artificial Sequence: Synthetic polypeptide
QLQLQESGPGLVKPSETLSLTCTVSGGSISSSSYYWGWIRQPPGKGLEWIGSIYYSGSTYYNPSLKSRVTISVDTSKNQFSLKLSSVTAADTAVYYCARDGAPLYDILTHDAFDIWGQGTMVTVSS

SEQ ID NO: 1468 - protein, 123 aa, Artificial Sequence
  Description of Artificial Sequence: Synthetic polypeptide
EVQLVESGGGLVRPGGSLRLSCVASGLPFSNPRMSWVRQSPGKGLEWVGRIRSKADGGTSDYAAPVKGRFTISWDDSKNIIYLQMDSLETEDTAMYWCATSHSFYYDGPFDYWGQGTLVTVSS

SEQ ID NO: 1469 - protein, 123 aa, Artificial Sequence
  Description of Artificial Sequence: Synthetic polypeptide
EVQLVESGGGLVQPGGSLRLSCVVAGTTFSDQFMDWVRQAPGKGLEWVGRSRNKARSYTTEYAASVKGRFTISRDDSKKSLYLQMNTLKTEDTAMYYCTRDGGEGGYTAFDIWGQGTMVTVSS

SEQ ID NO: 1470 - protein, 124 aa, Artificial Sequence
  Description of Artificial Sequence: Synthetic polypeptide
QLQLQESGPGLVKPSETLSLTCTVSGGSISSSSYYWGWIRQPPGKGLEWIGSIYYSGSTYYNPSLKSRVTISVDTSKNQFSLKLSSVTAADTAVYYCARHKMGWLQFAGWFDPWGQGTLVTVSS

SEQ ID NO: 1471 - protein, 130 aa, Artificial Sequence
  Description of Artificial Sequence: Synthetic polypeptide
QLQLQESGPGLVKPSETLSLTCTVSGGSISSSSYYWGWIRQPPGKGLEWIGSIYYSGSTYYNPSLKSRVTISVDTSKNQFSLKLSSVTAADTAVYYCARHAMSGITIFGVVTNNNWFDPWGQGTLVTVSS

SEQ ID NO: 1472 - protein, 120 aa, Artificial Sequence
  Description of Artificial Sequence: Synthetic polypeptide
QVTLKESGPALIKPTQTLTLTCTFSGFSLNTAGMRVNWIRQPPGKALEWLAHIDWEDEKFYSTSLKTRLSISKDTSKDQVVLTMTNMDPVDTATYYCARNEWDFDAFDIWGQGILVTVSS

SEQ ID NO: 1473 - protein, 125 aa, Artificial Sequence
  Description of Artificial Sequence: Synthetic polypeptide
AVQLVESGGGLVQPGGTLRLSCTASTFIFNNYAMSWVRQVPGKGLEWVSVISGSGSATYYADSVKGRFTISRDNSENTVDLQMNSLRPEDTATYYCAKVRAGSGSHKAGYYFEKWGQGTLVIVSS

SEQ ID NO: 1474 - protein, 127 aa, Artificial Sequence
  Description of Artificial Sequence: Synthetic polypeptide
QVQLQQWGTGLLKPSETLSLTCAVYGGSFAGYYWSWVRQPPGKGLQWIGEINHSGGTNYNPFLKSRVSISVDSSKNQFSLKLSSVTAADTAVYYCVRDSDMTLAAYYKGFQYGMDVWGQGTTVTVSS

SEQ ID NO: 1475 - protein, 128 aa, Artificial Sequence
  Description of Artificial Sequence: Synthetic polypeptide
QLQLQESGPGLVKPSETLSLTCTVSGGSITSRFDYWVWIRQPPGKGLEWIGSISHGGNTYYTPSLKSRVTISIDASKRQVFLELSSVTAADTAMYHCARAYCSGGSCYVYYYFYVDVWGEGTTVTVSS

SEQ ID NO: 1476 - protein, 124 aa, Artificial Sequence
  Description of Artificial Sequence: Synthetic polypeptide
QVQLQESGPGLVKPSETLSLTCTVSGGSISSHYWSWIRQPPGKGLEWIGYIYYSGSTNYNPSLKSRVTISVDTSKNQFSLKLSSVTAADTAVYYCARVRREWLAAYFYYGMDVWGQGTTVTVSS

SEQ ID NO: 1477 - protein, 129 aa, Artificial Sequence
  Description of Artificial Sequence: Synthetic polypeptide
QVQLVQSGGGVVQPGRSLRLSCAASGFSFSSYAMHWVRQAPGKGLEWVAVISFDQTTKYYADSVKGRFTISKDNSKNMLYLQMNTLRAEDTAVYYCARQEDYDYVWGIFRPRGWYIDLWGRGTLVTVSS

SEQ ID NO: 1478 - protein, 127 aa, Artificial Sequence
  Description of Artificial Sequence: Synthetic polypeptide
EVQLLESGGGLVQPGGSLRLSCAASGFTFSSYAMSWVRQAPGKGLEWVSAISGSGGSTYYADSVKGRFTISRDNSKNTLYLQMNSLRAEDTAVYYCAKTTGVTMIVVVIEGGYFDYWGQGTLVTVSS

SEQ ID NO: 1479 - protein, 133 aa, Artificial Sequence
  Description of Artificial Sequence: Synthetic polypeptide
QVQLVESGGGVVQPGRSLRLSCAASGFTFSSYGMHWVRQAPGKGLEWVAVIWYDGSNKYCADSVKGRFTISRDTSKNTLYLQMNSLRAEDTAVYYCAREAKPAGGRSFTIFGVATYYYYMDVWGKGTTVTVSS

SEQ ID NO: 1480 - protein, 123 aa, Artificial Sequence
  Description of Artificial Sequence: Synthetic polypeptide
QVQLQESGPGLVKPSETLSLTCTVSGGSISSHYWSWIRQPPGKGLEWIGYIYYSGSTNYNPSLKSRVTISVDTSKNQFSLKLSSVTAADTAVYYCARAPRGWLQLSPYYFDLWGRGTLVTVSS

SEQ ID NO: 1481 - protein, 123 aa, Artificial Sequence
  Description of Artificial Sequence: Synthetic polypeptide
QVQLVQSGAEVKKPGASVKVSCKVSGYTLTELSMHWVRQAPGKGLEWMGGFDPEDGETIYAQKFQGRVTMTEDTSTDTAYMELSSLRSEDTAVYYCATAFAYCGGDCYYPSYWGQGTLVTVSS

SEQ ID NO: 1482 - protein, 129 aa, Artificial Sequence
  Description of Artificial Sequence: Synthetic polypeptide
QLQLQESGPGLVKPSETLSLTCTVSGGSISSSSYYWGWIRQPPGKGLEWIGSIYYSGSTYYNPSLKSRVTISVDTSKNQFSLKLSSVTAADTAVYYCARQMPNRPMIVVVTIRGWFDPWGQGTLVTVSS

SEQ ID NO: 1483 - protein, 122 aa, Artificial Sequence
  Description of Artificial Sequence: Synthetic polypeptide
EEQLLESGGDLVQPGGSLRLSCAASGFTFSTYAMSWVRQAPGKGLEWVSAISGGGHFTYYADSVEGRFTISRDNSKNTLYLQMDRLRADDTAVYYCAKDPRLVTTGWYYDLWGRGTLVTVSS

SEQ ID NO: 1484 - protein, 124 aa, Artificial Sequence
  Description of Artificial Sequence: Synthetic polypeptide
QAQLVESGGGVVQPGRSLRLSCAASGFTFNNHGMHWVRQVPGKGLEWVAVISYEGSKKDYADSVKGRFSISRDNSKQTVYLQMNSLRVEDTAVYYCAKDAAIFMIYPSRYFDLWGRGTLLTVSS

SEQ ID NO: 1485 - protein, 123 aa, Artificial Sequence
  Description of Artificial Sequence: Synthetic polypeptide
EVQLVESGGGLVKPGGSLRLSCAASGFTFSSYSMNWVRQAPGKGLEWVSSISSSSSYIYYADSVKGRFTISRDNAKNSLYLQMNSLRAEDTAVYYCARGWYQLLLPYYYMDVWGKGTTVTVSS

SEQ ID NO: 1486 - protein, 120 aa, Artificial Sequence
  Description of Artificial Sequence: Synthetic polypeptide
QVQLVESGGGVVQPGRSLRLSCAASGFSFSTYAMHWVRQAPGKGLEWVAFMSYDGRNEYYADSVKGRFTTSRDNSKNTLYLQMNSLRTEDTAVYYCARVPGGVLGTFDIWGQGTMVTVSS

SEQ ID NO: 1487 - protein, 125 aa, Artificial Sequence
  Description of Artificial Sequence: Synthetic polypeptide
EVQLVESGGGVVRPGGSLRLSCAASGFTFDDYGMSWVRQAPGKGLEWVSGINWNGGSTGYADSVKGRFTISRDNAKNSLYLQMNSLRAEDTALYYCARWPLLGISGYYHYYMDVWGKGTTVTVSS

SEQ ID NO: 1488 - protein, 123 aa, Artificial Sequence
  Description of Artificial Sequence: Synthetic polypeptide
EVQLVESGGGLVQPGGSLRLSCGASSFIFSRYAMHWVRQAPGKGLEYVSTISSNGSNTYYAKSVKDRFIISRDNSKSTLYLQMGSLRVEDMAVYYCARSPGLAIHSSTSLDVWGKGTTVTVSS

SEQ ID NO: 1489 - protein, 124 aa, Artificial Sequence
  Description of Artificial Sequence: Synthetic polypeptide
QVTLKESGPVLVKPTETLTLTCTVSGFSLSNARMGVSWIRQPPGKALEWLAHIFSNDEKSYSTSLKSRLTISKDTSKSQVVLTMTNMDPVDTATYYCARIRAQWLTFYYYMDVWGKGTTVTVSS

SEQ ID NO: 1490 - protein, 121 aa, Artificial Sequence
  Description of Artificial Sequence: Synthetic polypeptide
QVQLVESGGGVVQPGRSLRLSCAASGFSFSTHGMHWVRQAPGKGLEWVAAIWYDGSNENYADSVRGRFTISRDNSKNILYLQMSSLRAEDTAIYYCARNHIPGSSLGFDPWGQGTLVTVSS

SEQ ID NO: 1491 - protein, 131 aa, Artificial Sequence
  Description of Artificial Sequence: Synthetic polypeptide
EVQLVESGGGLVQPGRSLRLSCTVSGFIIDDYAMSWVRQAPGKGLEWVGFIRSKTYGGTTEYAASVKGRFTISRDDSKGIVYLQMNSLQTQDTGVYYCTKDGRYDWNFILDSYYYYYMDVWGKGTTVTVSS

SEQ ID NO: 1492 - protein, 119 aa, Artificial Sequence
  Description of Artificial Sequence: Synthetic polypeptide
QGQLVQSGAEVRKPGSSVKVSCKASGGTLSTYAISWVRQAPGQGLEWMGRITPIFGTTNYAQKFQGRVTITADESTSTAYMEVSSLRFEDTAVYYCARGASGWFGMDVWGQGTTVTVSS

SEQ ID NO: 1493 - protein, 118 aa, Artificial Sequence
  Description of Artificial Sequence: Synthetic polypeptide
EVRLVQSATEMKKPGASVKISCKTSGYMFSKFGISWVRLAPGRGLEWMGWITPYNSDTVYAQNFQGRLTVTLDRAATTVSLELHNLRSDDTGRYYCARDPWRDCSSCWGQGTLLTVSS

SEQ ID NO: 1494 - protein, 126 aa, Artificial Sequence
  Description of Artificial Sequence: Synthetic polypeptide
QAQLVQSGAEVKKPGASVKVSCKASGYAFGSSDINWVRQATGQGLEWMGWMHPDSGNTVYAQNFQDRVTMTRDTSTSTAYMELRSLRSDDTAVYYCARGPRLVRFLQWSLNYMDVWGKGTTVTVSS

SEQ ID NO: 1495 - protein, 112 aa, Artificial Sequence
  Description of Artificial Sequence: Synthetic polypeptide
EVQLVESGGGLVQPGGTLRLSCVASGFNFSNYGMSWVRQAPGKGLEWVSAISGGGDGASYADSVKGRFTISRDNSKNTLYLQMNSLRADDTAVYYCAKIADWGQGTLVTVSS

SEQ ID NO: 1496 - protein, 128 aa, Artificial Sequence
  Description of Artificial Sequence: Synthetic polypeptide
QLQLQESGPGLVKPSETLSLTCTVSSGSIRSSNYYWGWIRQPPGKGLEWIGSVYDSGRTEYNPSLKSRVTISVDTSKNQFSLKLRSVTAADTAVYYCARHAGPHMVRGVMRNNWFDPWGQGSLVSVSS

SEQ ID NO: 1497 - protein, 117 aa, Artificial Sequence
  Description of Artificial Sequence: Synthetic polypeptide
QVQLVQSGAEVKKPGASVKVSCKASGYTFVDYAIHWVRQAPGQGLEWMGWIHAGNGNTKDSEKFQGRVTITRDTSANTVFLELSSLRSEDTAVYYCAIAAAGTQVVWGQGTLVTVSS

SEQ ID NO: 1498 - protein, 130 aa, Artificial Sequence
  Description of Artificial Sequence: Synthetic polypeptide
QLQLQESGPGLVKPSETLSLTCTVSGGSISSSSYYWGWIRQPPGKGLEWIGSIYYSGSTYYNPSLKSRVTISVDTSKNQFSLKLSSVTAADTAVYYCARHPLSSITIFGVVKREYYFDYWGQGTLVTVSS

SEQ ID NO: 1499 - protein, 118 aa, Artificial Sequence
  Description of Artificial Sequence: Synthetic polypeptide
QVHLVQSGAEVKKPGASVKISCKASGYTFTSYYVHWVRQAPGQGLEWMGIIKPSGAGTIYAQKFQGRVTMTRDTSTSTVYMELSSLISEDTAVYYCARGGGVTDRDYWGQGTLVTVSS

SEQ ID NO: 1500 - protein, 125 aa, Artificial Sequence
  Description of Artificial Sequence: Synthetic polypeptide
GVQLVQSGAEVKKPGDSLKISCKGFGYRYTNYWVAWVRQMPGKGLEWLGIIYPADSDTRYSPSFQGQVTISADKSITTAYLQWKSLKASDTAIYYCARSFEYCTGTTCQSWFDFWGQGTLVTVAS

SEQ ID NO: 1501 - protein, 125 aa, Artificial Sequence
  Description of Artificial Sequence: Synthetic polypeptide
QVQLVQSGAEVKKPGASVKVSCKASGYTFTSYDINWVRQATGQGLEWMGWMNPNSGNTGYAQKFQGRVTMTRNTSISTAYMELSSLRSEDTAVYYCARGRAYQLLFNYYYYMDVWGKGTTVTVSS

SEQ ID NO: 1502 - protein, 121 aa, Artificial Sequence
  Description of Artificial Sequence: Synthetic polypeptide
EVQLVESGGGLAQPGGTLRLSCTGYGFIFNNYGLTWVRQAPGKGLEWLSVLSGSSYIKYEADSVRGRFTISRDNSKNTLYLEMNSLTAEDTAVYYCARKGVGSQDYGLDVWGQGTTVIVSS

SEQ ID NO: 1503 - protein, 125 aa, Artificial Sequence
  Description of Artificial Sequence: Synthetic polypeptide
QVQLVQSGAEVKKPGASVKVSCKASGYTFTSYYMHWVRQAPGQGLEWMGIINPSGGSTSYAQKFQGRVTMTRDTSTSTVYMELSSLRSEDTAVYYCARDPTTVTTYDYYYGMDVWGQGTTVTVSS

SEQ ID NO: 1504 - protein, 116 aa, Artificial Sequence
  Description of Artificial Sequence: Synthetic polypeptide
EVQLLESGGGLVQPGGSLRLSCAASGFTFSSFAMTWIRQAPGKGLEWISAIGGDGGATYYVDSIKGRFTISRDNSKNTVYLHMNGLRVEDTAVYYCATPSPTRYSWGQGTLVTVSS

SEQ ID NO: 1505 - protein, 123 aa, Artificial Sequence
  Description of Artificial Sequence: Synthetic polypeptide
QVQLVESGGGVVQPGRSLRLSCAASGFTFSSYAMHWVRQAPGKGLEWVAVISYDGSNKYYADSVKGRFTISRDNSKNTLYLQMNSLRAEDTAVYYCARDPDYYDSSSDAFDIWGQGTMVTVSS

SEQ ID NO: 1506 - protein, 128 aa, Artificial Sequence
  Description of Artificial Sequence: Synthetic polypeptide
QVQLVQSGAEVKKPGASVKVSCKVSGYTLTELSMHWVRQAPGKGLEWMGGFDPEDAETIYAQKFQGRVTMTEDTSTDTAYMELSSLRSEDTAVYYCATALAVTGTSDSYYYYYGMDVWGQGTTVTVSS

SEQ ID NO: 1507 - protein, 120 aa, Artificial Sequence
  Description of Artificial Sequence: Synthetic polypeptide
QVTLRESGPALVKPTQTPTLTCTFSGFSLSTSGMCVSWIRQPPGKALEWLARIDWDDDKYYSTSLKTRLTISKDTSKNQVVLTMTNMDPVDTATYYCAREGVATISLDYWGQGTLVTVSS

SEQ ID NO: 1508 - protein, 120 aa, Artificial Sequence
  Description of Artificial Sequence: Synthetic polypeptide
QVTLRESGPALVKPTQTLTLTCTFSGFSLSTSGMCVSWIRQPPGKALEWLARIDWDDDKYYSTSLKTRLTISKDTSKNQVVLTMTNMDPVDTATYYCARTQANRVAFDIWGQGTMVTVSS

SEQ ID NO: 1509 - protein, 134 aa, Artificial Sequence
  Description of Artificial Sequence: Synthetic polypeptide
QVQLVESGGGVVQPGRSLRLSCAASGFTFSSYGMHWVRQAPGKGLEWVAVISYDGSNKYYADSVKGRFTISRDNSKNTLYLQMNSLRAEDTAVYYCAKDQKYYDILTGYYRSTYYYYYYGMDVWGQGTTVTVSS

SEQ ID NO: 1510 - protein, 127 aa, Artificial Sequence
  Description of Artificial Sequence: Synthetic polypeptide
QVQLVESGGGVVQPGRSLRLSCAASGFTFSSYGMHWVRQAPGKGLEWVAVIWYDGSNKYYADSVKGRFTISRDNSKNTLYLQMNSLRAEDTAVYYCAKVGSPYCSGGSCYSGYFDYWGQGTLVTVSS

SEQ ID NO: 1511 - protein, 123 aa, Artificial Sequence
  Description of Artificial Sequence: Synthetic polypeptide
QVQLVESGGGVVQPGRSLRLSCAASGFTFSSYGMHWVRQAPGKGLEWVAVISYDGSNKYYADSVKGRFTISRDNSKNTLYLQMNSLRAEDTAVYYCAKSPEGAAAGTGYFDYWGQGTLVTVSS

SEQ ID NO: 1512 - protein, 121 aa, Artificial Sequence
  Description of Artificial Sequence: Synthetic polypeptide
QVQLVQSGAEVKKPGASVKVSCKVSGYTLIELSMHWVRQAPGKGLEWMGGFDPEDGETIYAQKFQGRVTMTEDTSTDTAYMELSSLRSEDTAVYYCATGPAAATSGWFDPWGQGTLVTVSS

SEQ ID NO: 1513 - protein, 119 aa, Artificial Sequence
  Description of Artificial Sequence: Synthetic polypeptide
QITLKESGPTLVKPTQTLTLTCTFSGFSLSTSGVGVGWIRQPPGKALEWLALIYWDDDKRYSPSLKSRLTITKDTSKNQVVLTMTNMDPVDTATYYCAHHEVATVFDYWGQGTLVTVSS

SEQ ID NO: 1514 - protein, 129 aa, Artificial Sequence
  Description of Artificial Sequence: Synthetic polypeptide
QVQLQQWGAGLLKPSETLSLTCAVYGGSFSGYYWSWIRQPPGKGLEWIGEINHSGSTNYNPSLKSRVTISVDTSKNQFSLKLSSVTAADTAVYFCARGTGIAVAGVLVNFYYCYYMDVWGKGTTVTVSS

SEQ ID NO: 1515 - protein, 119 aa, Artificial Sequence
  Description of Artificial Sequence: Synthetic polypeptide
EVQLVESGGGLVQPGGSLRLSCAASGFNFSFYWMSWVRQAPGKGLEWVANIKQDGSEKYYVDSVKGRFTISRDNAKNSLYLQMNSLRAEDTAVYYCARLSGGSWYFDYWGQGTLVTVSS

SEQ ID NO: 1516 - protein, 112 aa, Artificial Sequence; identical to SEQ ID NO: 1429
  Description of Artificial Sequence: Synthetic polypeptide

SEQ ID NO: 1517 - protein, 118 aa, Artificial Sequence
  Description of Artificial Sequence: Synthetic polypeptide
QVTLKESGPALVKPTQTLTLTCTFSGFSLSTSGMRVSWIRQPPGKALEWLARIDWDDDKFYSTSLKTRLTISKDTSKNQVVLTMTNMDPVDTATYYCARYYYYGMDVWGQGTTVTVSS

SEQ ID NO: 1518 - protein, 128 aa, Artificial Sequence
  Description of Artificial Sequence: Synthetic polypeptide
EVQLVESGGGLVKPGGSLRLSCAASGFTFSNAWMSWVRQAPGKGLEWVGRIKSKTDGGTTDYAAPVKGRFTISRDDSKNTLYLQMNSLKTEDTAVYYCTTGRYYYDSSGYANDAFDIWGQGTMVTVSS

SEQ ID NO: 1519 - protein, 122 aa, Artificial Sequence
  Description of Artificial Sequence: Synthetic polypeptide
QVQLVQSGAEVKKPGSSVKVSCKASGGTFSSYAISWVRQAPGQGLEWMGGIIPILGTANYAQKFQGRVTITADKSTSTAYMELSSLRSEDTAMYYCAREGGFYGSGRNFDYWGQGTLVTVSS

SEQ ID NO: 1520 - protein, 129 aa, Artificial Sequence
  Description of Artificial Sequence: Synthetic polypeptide
QVQLVESGGGLVKPGGSLRLSCAASGFTFSDYYMSWIRQAPGKGLEWVSYISSSGSTIYYADSVKGRFTISRDNAKNSLYLQMNSLRAEDTAVYYCARDSTRYCSSTSCSSYYYGMDVWGQGTTVTVSS

SEQ ID NO: 1521 - protein, 121 aa, Artificial Sequence
  Description of Artificial Sequence: Synthetic polypeptide
QVQLVESGGGVVQPGRSLRLSCAASGFTFSSYAMHWVRQAPGKGLEWVAVISYDGSNKYYADSVKGRFTISRDNSKNTLYLQMNSLRAEDTAVYYCARDSDDYGDYYFDYWGQGTLVTVSS

SEQ ID NO: 1522 - protein, 127 aa, Artificial Sequence
  Description of Artificial Sequence: Synthetic polypeptide
QVQLQQWGAGLLKPSETLSLTCAVYGGSFSGYSWSWIRQPPGKGLEWIGEINHSGSTNYNPSLKSRVTISVDTSKNQFSLKLSSVTAADTAVYYCAREGRFLEWLLGVNYYYYMDVWGKGTTVTVSS

SEQ ID NO: 1523 - protein, 121 aa, Artificial Sequence
  Description of Artificial Sequence: Synthetic polypeptide
EVQLVESGGGLVQPGRSLRLSCTASGFTFGDYAMSWVRQAPGKGLEWVGFIRSKAYGGTTEYAASVKGRFTISRDDSKSIAYLQMNSLKTEDTAVYYCTREDFWSGYSDYWGQGTLVTVSS

SEQ ID NO: 1524 - protein, 126 aa, Artificial Sequence
  Description of Artificial Sequence: Synthetic polypeptide
QVQLVESGGGVVQPGRSLRLSCAASGFTFSSYGMHWVRQAPGKGLEWVAVISYDGSNKYYADSVKGRFTISRDNSKNTLYLQMNSLRAEDTAVYYCAKDPGITIFGVVYYYYMDVWGKGTTVSISS

SEQ ID NO: 1525 - protein, 124 aa, Artificial Sequence
  Description of Artificial Sequence: Synthetic polypeptide
QVQLVESGGGVVQPGRSLRLSCAASGFTFSSYAMHWVRQAPGKGLEWVAVISYDGSNKYYADSVKGRFTISRDNSKNTLYLQMNSLRAEDTAVYYCARACSSTSCYKGDAFDIWGQGTMVTVSS

SEQ ID NO: 1526 - protein, 117 aa, Artificial Sequence
  Description of Artificial Sequence: Synthetic polypeptide
QVQLVQSGAEVKKPGASVKVSCKASGYTFAGYDINWVRQAPGQGLEWMGWASTKNDNTGYAQKFQGRVTMTRDIFTSTVFMELSSLNFEDTAVYYCARGVDQGVDYWGQGTLVTVSS

SEQ ID NO: 1527 - protein, 125 aa, Artificial Sequence
  Description of Artificial Sequence: Synthetic polypeptide
EVQLVESGGGLVQPGGSLRLSCAASGFTFSSYWMSWVRQAPGKGLEWVANIKQDGSEKYYVDSVKGRFTISRDNAKNSLYLQMNSLRAEDTAVYYCARDFNDFWSGYYGPSFDYWGQGTLVTVSS

SEQ ID NO: 1528 - protein, 122 aa, Artificial Sequence
  Description of Artificial Sequence: Synthetic polypeptide
QVQLVESGGGVVQPGRSLRLSCAASGFTFSSYAMHWVRQAPGKGLEWVAVISYDGSNKYYADSVKGRFTISRDNSKNTLYLQMNSLRAEDTAVYYCARVWVPKVYYYGMDVWGQGTTVTVSS

SEQ ID NO: 1529 - protein, 119 aa, Artificial Sequence
  Description of Artificial Sequence: Synthetic polypeptide
QVQLQQWGAGLLKPSETLSLTCAVYGGSFSGYYWSWIRQPPGKGLEWIGEINHSGSTNYNPSLKSRVTISVDTSKNQFSLKLSSVTAADTAVYYCARSWSSWSYAFDIWGQGTMVTVSS

SEQ ID NO: 1530 - protein, 120 aa, Artificial Sequence
  Description of Artificial Sequence: Synthetic polypeptide
EVQLVESGGGLVQPGGSLRLSCAASGFTFSSYWMSWVRQAPGKGLEWVANIKQDGSEKYYVDSVKGRFTISRDNAKNSLYLQMNSLRAEDTAVYYCARDSSDPIGAFDIWGQGTMVTVSS

SEQ ID NO: 1531 - protein, 125 aa, Artificial Sequence
  Description of Artificial Sequence: Synthetic polypeptide
EVQLVESGGGLVKPGGSLRLSCAASGFTFSSYSMNWVRQAPGKGLEWVSSISSSSSYIYYADSVKGRFTISRDNAKNSLYLQMNSLRAEDTAVYYCATIPAAMESAYYYYGMDVWGQGTTVTVSS

SEQ ID NO: 1532 - protein, 113 aa, Artificial Sequence
  Description of Artificial Sequence: Synthetic polypeptide
EVQLLESGGGLVQPGGSLRLSCAASGFTFSSYAMSWVRQAPGKGLEWVSAISGSGGSTYYADSVKGRFTISRDNSKNTLYLQMNSLRAEDTAVYYCAKRLDYWGQGTLVTVSS

SEQ ID NO: 1533 - protein, 119 aa, Artificial Sequence
  Description of Artificial Sequence: Synthetic polypeptide
QVQLVESGGGVVQPGRSLRLSCAASGFTFSSYGMHWVRQAPGKGLEWVAVISYDGSNKYYADSVKGRFTISRDNSKNTLYLQMNSLRAEDTAVYYCAKDYGDYGGMDVWGQGTTVTVSS

SEQ ID NO: 1534 - protein, 116 aa, Artificial Sequence
  Description of Artificial Sequence: Synthetic polypeptide
QVQLVESGGGVVQPGRSLRLSCAASGFSFRSFGMHWVRQAPGKGLEWVALITYDATEKHFGDSVKGRFTISRDNPKNTVYLQMNSLTTEDTAVYYCVKDLGYKDNWGQGTLVIVSS

SEQ ID NO: 1535 - protein, 122 aa, Artificial Sequence
  Description of Artificial Sequence: Synthetic polypeptide
EVQLLESGGGLVQPGGSLRLSCAASGFTFSSYAMSWVRQAPGKGLEWVSAISGSGGSTYYADSVKGRFTISRDNSKNTLYLQMNSLRAEDTAVYYCAKHARRHDYGDYFDYWGQGTLVTVSS

SEQ ID NO: 1536 - protein, 122 aa, Artificial Sequence
  Description of Artificial Sequence: Synthetic polypeptide
QVQLQESGPGLVKPSETLSLTCTVSGGSISSYYWSWIRQPPGKGLEWIGYIYYSGSTYYNPSLKSRVTISVDTSKNQFSLKLSSVTAADTAVYYCARALRGIFGVVNWFDPWGQGTLVTVSS

SEQ ID NO: 1537 - protein, 124 aa, Artificial Sequence
  Description of Artificial Sequence: Synthetic polypeptide
QVQLQQWGAGLLKPSETLSLTCAVYGGSFSGYYWSWIRQPPGKGLEWIGEINHSGSTNYNPSLKSRVTISVDTSKNQFSLKLSSVTAADTAVYYCARLSRQWLVRPHIYYFDYWGQGTLVTVSS

SEQ ID NO: 1538 - protein, 122 aa, Artificial Sequence
  Description of Artificial Sequence: Synthetic polypeptide
QVTLRESGPALVKPTQTLTLTCTFSGFSLSTSGMCVSWIRQPPGKALEWLARIDWDDDKYYSTSLKTRLTISKDTSKNQVVLTMTNMDPVDTATYYCARSPIAARAGGFDYWGQGTLVTVSS

SEQ ID NO: 1539 - protein, 121 aa, Artificial Sequence
  Description of Artificial Sequence: Synthetic polypeptide
QVQLVESGGGVVQPGGSLRFSCAASGFTFSTYGMHWVRQAPGKGLEWVAAIWYDGSNKYYADSVKGRFTISRDNSKNTLYLQMDSLRAEDTAVYYCARRGVTISYYYMDVWGKGTTVTVSS

SEQ ID NO: 1540 - protein, 118 aa, Artificial Sequence
  Description of Artificial Sequence: Synthetic polypeptide
QVQLVQSGAEVKKPGSSVKVSCKASGGTFSSYAISWVRQAPGQGLEWMGGIIPIFGTANYAQKFQGRVTITADESTSTAYMELSSLRSEDTAVYYCASVGGDYDLDYWGQGTLVTVSS

SEQ ID NO: 1541 - protein, 122 aa, Artificial Sequence
  Description of Artificial Sequence: Synthetic polypeptide
QVQLQESGPGLVKPSETLSLTCTVSGGSISSYYWSWIRQPPGKGLEWIGYIYYSGSTNYNPSLKSRVTISVDTSKNQFSLKLSSVTAADTAVYYCARGATIFGVVIRPFDYWGQGTLVTVSS

SEQ ID NO: 1542 - protein, 128 aa, Artificial Sequence
  Description of Artificial Sequence: Synthetic polypeptide
QLQLQESGPGLVKPSETLSLTCTVSGGSISSSSYYWGWIRQPPGKGLEWIGSIYYSGSTYYNPSLKSRVTISVDTSKNQFSLKLSSVTAADTAVYYCARHTFGITIFGVVTRTGFDPWGQGTLVTVSS

SEQ ID NO: 1543 - protein, 117 aa, Artificial Sequence
  Description of Artificial Sequence: Synthetic polypeptide
QVQLVESGGGVVQPGRSLRLSCAASGFTFSSYAMHWVRQAPGKGLEWVAVISYDGSNKYYADSVKGRFTISRDNSKNTLYLQMNSLRAEDTAVYYCAREMGSGMDVWGQGTTVTVSS

SEQ ID NO: 1544 - protein, 119 aa, Artificial Sequence
  Description of Artificial Sequence: Synthetic polypeptide
DVQLVESGGGLVQPGGSLRLSCAGFRFSTSENYVDWVRRAPGKGLEWVARSKNRASSFATEYAASVKGRFTISRDDSTNSVSLQMNSLKIEDTALYYCAGSIAVAGAIWGQGTMVTVSS

SEQ ID NO: 1545 - protein, 121 aa, Artificial Sequence
  Description of Artificial Sequence: Synthetic polypeptide
QVQLVESGGGVVQPGRSLRLSCAASGFTFSSYAMHWVRQAPGKGLEWVAVISYDGSNKYYADSVKGRFTISRDNSKNTLYLQMNSLRAEDTAVYYCARARGGNYYYGMDVWGQGTTVTVSS

SEQ ID NO: 1546 - protein, 129 aa, Artificial Sequence
  Description of Artificial Sequence: Synthetic polypeptide
QLQLQESGPGLVKPSETLSLTCTVSGGSISSSSYYWGWIRQPPGKGLEWIGSIYYSGSTYYNPSLKSRVTISVDTSKNQFSLKLSSVTAADTAVYYCASREVVLRYFDWSSPMGGFDPWGQGTLVTVSS

SEQ ID NO: 1547 - protein, 119 aa, Artificial Sequence
  Description of Artificial Sequence: Synthetic polypeptide
ELQLVETGGGLVQPGGTLTISCAASGFTLNTYAMSWVRQAPGKALEWVASSSGTGATTNYADSVNGRFSISRDNRRNTLFLQMDNLRADDTALYYCVRDGYNMIPFDMWGQGTMVTVSS

SEQ ID NO: 1548 - protein, 120 aa, Artificial Sequence
  Description of Artificial Sequence: Synthetic polypeptide
QVQLQQWGAGLLKPSETLSLTCAVSGGSFSGYYWSWIRQVPDKGLEWIGEINHAGSLSYNPSLKSRVSMTDDTPKKQFFLKLTSLTAADSGVYYCVRWGPVGNTWAFDYWGPGTAVIVSS

SEQ ID NO: 1549 - protein, 119 aa, Artificial Sequence
  Description of Artificial Sequence: Synthetic polypeptide
QVQLQESGPGLVTPSGTLSLTCGVSGDSIYSDYWWTWVRQSPGKGLEWIGEVYRSGTRQYSPSLESRVTISIDTSGNQFSLNLISVTAADTAVYYCAAMRDGYGSGWLWGQGTLVTVSS

SEQ ID NO: 1550 - protein, 128 aa, Artificial Sequence
  Description of Artificial Sequence: Synthetic polypeptide
QVQLQQWGAGRLKPSETLSLTCAVYGGSLGGYYWTWIRQPPGGGLEWIGESDESGKTDYNPSLKSRVTVSVDTSKNQFSLKLTSVTAADTAVYYCARGHTSIYGVLIMLFHASWLDPWGQGTLVTVSS

SEQ ID NO: 1551 - protein, 117 aa, Artificial Sequence
  Description of Artificial Sequence: Synthetic polypeptide
EVQLVESGGGLVQPGGSLRLSCAASGFVFRRYWMHWIRQAPGKGLAWVSRTNEDGTITNYADSVKGRFTISRDNTKNTLYLQMNDLRVEDTATYFCARDVGGADGHWGQGTLVTVSS

SEQ ID NO: 1552 - protein, 118 aa, Artificial Sequence
  Description of Artificial Sequence: Synthetic polypeptide
LVQLIQSGAEVVKPGSSVKVSCTASGGSYSSYTLSWVRQAPGQGVEWLGRISPVLNTTYYAQKLEGRVTMTADESTSTVYMQLSSLRSEDTAVYYCARLASMNGVDIWGQGTSVTVSS

SEQ ID NO: 1553 - protein, 128 aa, Artificial Sequence
  Description of Artificial Sequence: Synthetic polypeptide
QVQLVQSGAEVKRPGASVKVSCKASGYTFTHYYIHWVRQAPGQGLEWVGRINPNSGGTHYAQKFQGRVTMTRDTSISTVYLELTSLRSDDTALYYCARDSETDTSLAVAYYYYYMDVWGKGTAVAVSS

SEQ ID NO: 1554 - protein, 126 aa, Artificial Sequence
  Description of Artificial Sequence: Synthetic polypeptide
QVQLVESGGSVVQPGRSLTLSCAASQFIFSSYAMHWVRQAPGEGLEWVAMIYSDSSEKHYADSVKGRFTISRDNSKNTVSLQMNSLGAEDTAVYYCAREGREYSDNSGKRGYFDSWGQGTLVTVSS

SEQ ID NO: 1555 - protein, 121 aa, Artificial Sequence
  Description of Artificial Sequence: Synthetic polypeptide
QVQLVESGGGVVQPGRSLRLSCAASGFTLRTYAMHWVRQAPGKGLAWVAIISYSGDTEYDAGSVRGRFTISRDTSKNMLYLQMNSLRAEDTGIYYCAREGEDYSSSYFDHWGQGTLVTVSS

SEQ ID NO: 1556 - protein, 126 aa, Artificial Sequence
  Description of Artificial Sequence: Synthetic polypeptide
QVQLQQWGAGLVKPSETLSLTCAVYGGSFSYYSWSWSWIRQPPGKGLEWIGEIIHRGRTNSNPSLKSRVTVSRDTSKNQFSLNLSSVTAADTAVYYCARHRIVEATFSRYDYFDSWGQGTLVTVSS

SEQ ID NO: 1557 - protein, 126 aa, Artificial Sequence
  Description of Artificial Sequence: Synthetic polypeptide
QVQLQQWGAELLKPSETLSLTCAVYGGSFNNHAWTWLRRPPGKGLEWIGEVIPHGSTKCDPSLKSRVTMSVDASKNQFSMKLISVSAADTAVYYCARRSGESNGWGTYYHYGMDVWGQGTTVIVSS

SEQ ID NO: 1558 - protein, 126 aa, Artificial Sequence
  Description of Artificial Sequence: Synthetic polypeptide
QVQLQQWGAGLLKPSETLSLTCAVYGGSFTNYWWRWTWVRQPPGRGLEWIGEIDRSGTTNYSPSLKSRVTISVDTSKNQFSLTVTSVTAADTAVYYCARGRTPTGTFDYYSYLDVWGKGTTIAVSS

SEQ ID NO: 1559 - protein, 120 aa, Artificial Sequence
  Description of Artificial Sequence: Synthetic polypeptide
QVQLQQWGAGLLKPSETLSLTCAAHGGSFSGYYWSWIRRPPGKGLEWIGEITHSGRTNYNPSLTRRLSVFVDTPKSQFSLKLSSVTAADTATYYCARWDCTDGTCYAVYWGQGTLVTVSS

SEQ ID NO: 1560 - protein, 130 aa, Artificial Sequence
  Description of Artificial Sequence: Synthetic polypeptide
QVQLQQWGAGLLKASETLSLTCAVYGGSFSNYYWNWIRQSPGKGLEWIGEINYRGNTKYNPSLRSRVTISVDTSKNQFSLKLSSLSAADTALYYCARGLGPPVGSLAITFGGLRRSFDIWGQGTMVIVSS

SEQ ID NO: 1561 - protein, 124 aa, Artificial Sequence
  Description of Artificial Sequence: Synthetic polypeptide
QVQLVQSGAEVKKPGASVKVSCKVSGYTLSKLFMHWVRQAPGKELEWMGGSVPEDDNTIYAEKFRGRVTMTEDTSTDTAYMELSSLRSEDTALYFCATFRRQRGGYYYYGLDLWGQGTSVTVSS

SEQ ID NO: 1562 - protein, 124 aa, Artificial Sequence
  Description of Artificial Sequence: Synthetic polypeptide
EVHLVESGGGLVQPGRSLRLSCAASGFKFDDYAMHWVRQGPSKGLEWVAGISWNSGSIDYADSVKGRFTISRDNAKNSLFLEMNSLTTEDTALYYCAKVKLTVFGVEQSPLDSWGQGTLVTVSS

SEQ ID NO: 1563 - protein, 124 aa, Artificial Sequence
  Description of Artificial Sequence: Synthetic polypeptide
EVQLLESGGGLVQPGGSLRLSCAVSGFTFSRYAMAWVRQAPGKGLEWVSTISDTDGSTIYYTDSVKGRFSISRDNSKNTLYLQMNSLRAEDTAVYYCTIQARVPSAMKVYFQNWGQGTLVTVSS

SEQ ID NO: 1564 - protein, 118 aa, Artificial Sequence
  Description of Artificial Sequence: Synthetic polypeptide
QVQLVQSGAEVRKPGSSVKVSCNVSGGIFNSYKITWVRQAPGQGLEWMGGIIAIFGTADYAQRFQGRLSITADESTSTAYMELSSLRSDDTAVYYCTRERFSNYFDPWGQGTLVTVSS

SEQ ID NO: 1565 - protein, 124 aa, Artificial Sequence
  Description of Artificial Sequence: Synthetic polypeptide
QVQLVQSGAEVKKPGASVKVSCKASGYIFTNYDLSWVRQATGQGLEWMGWMNPYSGNTGFSQKFQGRVTMTRNTSISTVYMELNSLRSEDTAIYYCARGRDVGQWLVGEGFDYWGQGSLVTVSS

SEQ ID NO: 1566 - protein, 122 aa, Artificial Sequence
  Description of Artificial Sequence: Synthetic polypeptide
QVQLVQSGAEVKKPGSSVKVSCKTSGGTFSNNAISWVRQAPGQGLEWMGRIIPMVGVADYAQKLQGRVTLTADKSTTTAFMELNSLTSEDTAVYYCARGKPFDFWSGLFDSWGQGTRVTVSS

SEQ ID NO: 1567 - protein, 128 aa, Artificial Sequence
  Description of Artificial Sequence: Synthetic polypeptide
QMQLQESGPGLVKPSETLSLTCTVSHGSIRSQYWSWIRQSPGKGLEWIGYIYDSGSSKYNPSLKSRVTISLDTSKNEVYLKLNSVTSADTAVYYCARRKVSFPRPSDDSSFDWFFDLWGRGTLVTVSS

SEQ ID NO: 1568 - protein, 122 aa, Artificial Sequence
  Description of Artificial Sequence: Synthetic polypeptide
EVQLVQSGAEVKEPGESLKISCKASGYTFINYWIGWVRQMPGKGLEWMGIIYPGDSDTRYSPSFQGQVTISADKSITTAYLRWNSLKASDTAVYYCAREDIIENERGGFDIWGQGTMVTVSS

SEQ ID NO: 1569 - protein, 119 aa, Artificial Sequence
  Description of Artificial Sequence: Synthetic polypeptide
QVQLVESGGGVVQPGRSLRLSCAASGFTFDNFGFHWVRQAPGKGLEWVAVISHDGTNEYYGDSVKGRFTISRDDSKNTLFLQMNSLRTEDTAVYYCGRDRIALAEIDYWGQGTLVTVSS

SEQ ID NO: 1570 - protein, 122 aa, Artificial Sequence
  Description of Artificial Sequence: Synthetic polypeptide
EVQLVESGGGLVKPGGSLRLSCGASGFNFNYYGMNWVRQAPGKGLEWVSSISSSSSHIYYADSVKGRFAISRDNAKNSLYLQMNSLRVDDTGLYFCVRDRSFEYGDYGGDNWGQGTLVTVSS

SEQ ID NO: 1571 - protein, 131 aa, Artificial Sequence
  Description of Artificial Sequence: Synthetic polypeptide
QVQLVQSGAEVKKPGASVKVSCKPSGYTFTDYYIHWVRQAPGQGLEWMGWINPDTSATNYAQNFQGRLTMARDTSISTAYMELSGLRSDDTAVYFCTRVPHYYGSDTYYKPWYYYYAMDVWGQGTTVTVSS

SEQ ID NO: 1572 - protein, 125 aa, Artificial Sequence
  Description of Artificial Sequence: Synthetic polypeptide
QVQLVQSGAEVKRPGSSVKVSCKASGGTFSSYAISWVRQAPGQGLEWMGEIIPVFGAPKFAQKFRGRVTITADESTNTAYMELNSLRSDDTAVYYCAVGYCSSSSCEPQDAFDIWGQGTMVTVSS

SEQ ID NO: 1573 - protein, 122 aa, Artificial Sequence
  Description of Artificial Sequence: Synthetic polypeptide
QVQLVQSGAEVKKTGASVKLSCKASGYSLTSYAMHWVRQAPGQRLEWMGWLNGGNGNTKYSQKFQARVTITSDTSARTVYMELSSLTSEDTAVYYCARADHSTYWYGWFDPWGQGTLVTVSS

SEQ ID NO: 1574 - protein, 122 aa, Artificial Sequence
  Description of Artificial Sequence: Synthetic polypeptide
EEQLVESGGVVVQPGGSLRLSCAASGFTFDDYTMHWVRQPPGKGLEWVSLISWDGGSKYYADSVMGRFTISRDNSKNSLYLQMSSLRTEDTALYYCVKDISSSPANYGFAIWGLGTLVTVSS

SEQ ID NO: 1575 - protein, 121 aa, Artificial Sequence
  Description of Artificial Sequence: Synthetic polypeptide
QLQLQESGPGLVKPSETLSLTCTVSGGSISSTANYWGWIRQPPGKRLEWIGCISYSGRTYDNPSLKSRVTFSVDTSKNQFSLKLSSLTAADTAMYYCARHAGWFGEHLDYWGQGTLVTVSS

SEQ ID NO: 1576 - protein, 118 aa, Artificial Sequence
  Description of Artificial Sequence: Synthetic polypeptide
QVHLVQSGAEVKTPGASVRVSCKASGYTFTSHYMHWVRQAPGQGLEWMGLINPSGSGTAYPQHFQGRVTMTRDTSTTTDYMDLSSLRSEDTAMYFCARMERSGAFDLWGQGTMVTVSS

SEQ ID NO: 1577 - protein, 119 aa, Artificial Sequence
  Description of Artificial Sequence: Synthetic polypeptide
QVQLVQSGAEVKKPGSSVKVSCKPSGGTFNSYAFTWVRQAPGQGLEWMGTVLPIFDTTHSAQKFQGRVTISADKSANTVYMELSSLTSGDTAVYYCVGRYGSGNYEGYWGQGTLVTVSS

SEQ ID NO: 1578 - protein, 119 aa, Artificial Sequence
  Description of Artificial Sequence: Synthetic polypeptide
QVQLVQSGAEVQKPGSSVKVSCKASGGTFVNFAICWVRQAPGQGLEWIGGIIPVFGATNYAQKFRGRVTITADESTSTAYMELSGLTSEDTALYYCAKDLLSDRQDPSWGQGTLVTVSS

SEQ ID NO: 1579 - protein, 124 aa, Artificial Sequence
  Description of Artificial Sequence: Synthetic polypeptide
QVTLKESGPVLVKPTETLTLTCTVSGLALSNGRMGVSWIRQSPGKALEWLAHIFSNDAKSYSTSLKGRLTISKDTSRSQVVLTMTNMDPVDTATYYCASIDERLGILYWYFHLWGRGSLVSVSS

SEQ ID NO: 1580 - protein, 125 aa, Artificial Sequence
  Description of Artificial Sequence: Synthetic polypeptide
QVQLVQSGAEVKKPGSSVKVSCKASGGTFTNYAINWVRQAPGQGLEWMGGIIPVFGAPNYAQKFQGRVTITADTSTSTAYMELSSLRSEDTAVYYCARVGYCSTTGCDMGGLDYWGQGTLVTVSS

SEQ ID NO: 1581 - protein, 122 aa, Artificial Sequence
  Description of Artificial Sequence: Synthetic polypeptide
EVQLEQSGAEVKKPGESLKISCKGSGYTFTSYWIVWVRQMPGKGLEWLGIIYPGDSDTRYSLAFQGQVTISADKSISTAYLQWSSLKPSDTAFYYCARLSAQRGNSGPAVYWGQGTLVTVSS

SEQ ID NO: 1582 - protein, 123 aa, Artificial Sequence
  Description of Artificial Sequence: Synthetic polypeptide
EVLLLESGGDLVQPGGSLRLSCAASGFTFSSYGMNWVRQAPGKGLEWVSSISGSGGSPYYADSVKGRFTISRDNSKNTLYLQMKSLRAEDTAIYYCAKSEETMTTVTTFFDYWGQGTLVTVSS

SEQ ID NO: 1583 - protein, 113 aa, Artificial Sequence
  Description of Artificial Sequence: Synthetic polypeptide
EVQLLESGGGLVQPGGSLRLSCAASGFTFSSYAMSWVRQAPGKGLECVALINGGGGRTYYTDSVKGRFTISRDNSKNTLYLQMNSLRAEDTAVYYCERSVGYWGQGTLVTVSS

SEQ ID NO: 1584 - protein, 122 aa, Artificial Sequence
  Description of Artificial Sequence: Synthetic polypeptide
EVQLVESGGGLEQPGRSLRLSCAASGITFEDYALHWVRQAPGKGLEWVSGISWNGANIGYADSVKGRFTISRDNAQKSLYLQMSGLRTEDTALYYCAKSTVTTLRRTYFDSWGHGTLVIVSS

SEQ ID NO: 1585 - protein, 119 aa, Artificial Sequence
  Description of Artificial Sequence: Synthetic polypeptide
QVYLVQSGAEVKKPGASVKVSCKVSGNTLSELYIYWVRQAPGKGLEWMGGFDPEDGETIYAQNFQGRVTITEDTSTDTVYMELSSLRSEDTATYYCATHDFGDSEGEYWGQGTQVTVSS

SEQ ID NO: 1586 - protein, 123 aa, Artificial Sequence
  Description of Artificial Sequence: Synthetic polypeptide
PVQLVQSGAEVKKPGASVKVSCQTSGYTFTNYAVHWVRQAPGQGLEWMGWINAGNGNTKYSQKFQGRVTITRDTSASTAYMELSSLRSEDTAVYYCAKDQWADYHTTGDFEYWGQGTLVTVSS

SEQ ID NO: 1587 - protein, 129 aa, Artificial Sequence
  Description of Artificial Sequence: Synthetic polypeptide
EVQLVESGGGLVPPGRSLRLSCRASGFTFGDYAMNWFRQAPGKGLEWVGFIRSKVYGETTEYAASVKGRFTISRDDSRSIAYLQMDSLKTEDTAVYFCTRDGRLLWFEESDWGDAFGIWGQGTMVTVSS

SEQ ID NO: 1588 - protein, 128 aa, Artificial Sequence
  Description of Artificial Sequence: Synthetic polypeptide
QLQLQESGPGLKKPSETLSLTCTVSGASLISNSYYWGWIRQPPGKGLEWIGSIFYSGTTHYNPSLKSRVTISVDTSKNQFSLRLTSVTAADTAVYYCARLTVDRRLQGYYYYYYMDVWGKGTTVTVSS

SEQ ID NO: 1589 - protein, 122 aa, Artificial Sequence
  Description of Artificial Sequence: Synthetic polypeptide
QVQLVESGGGVVQPGGSLRLSCAASGFTFSNYGMHWVRQAPGKGLEWVAFIRYDGSNEYYADSVKGRFTISRDNSKNTLYLHMNSLRPEDTAVYYCAKQGLLSNYYYGMDVWGQGTTVTVSS

SEQ ID NO: 1590 - protein, 130 aa, Artificial Sequence
  Description of Artificial Sequence: Synthetic polypeptide
QVQLAESGGGVVQPGGSLRLSCAASGFTFSSHGMHWVRQAPGKGLEWVAFIRYDGSNKYYADSVKGRFTIFRDNSKNTLYLQMNSLRAEDTAVYYCAKDNYYDILTGYYRKYYYFGMDVWGQGTTVTVSS

SEQ ID NO: 1591 - protein, 122 aa, Artificial Sequence
  Description of Artificial Sequence: Synthetic polypeptide
QVQLQESGPGLVKPSETLSLTCTVSGGSISSYYWSWIRQPPGKGLEWIGYIHYSGSTIYNPSLKSRVTISVDTSKSQFSLKLSSVTAADTAVYYCARTAGSDDSGYLPFDYWGQGTLVTVSS

SEQ ID NO: 1592 - protein, 128 aa, Artificial Sequence
  Description of Artificial Sequence: Synthetic polypeptide
QLQLQESGPGLVKPSETLSLTCTVSGGSISSSSYYWGWIRQPPGKGLEWIGSIYYSGSTYYNPSLKSRVTISVDTSKNQFSLKLSSVTAADTAVYYCSRSPFSISIFGVVIRYGMDVWGQGTTVTVSS

SEQ ID NO: 1593 - protein, 127 aa, Artificial Sequence
  Description of Artificial Sequence: Synthetic polypeptide
QVQLQESGPGLVKPSQTLSLTCTVSGGSISSGDYYWSWIRQPPGKGLEWIGYIYYSGSTYYNPSLKSRVTISVDTSKNQFSLKLSSVTAADTAVYYCARAITKITIFGVVIENFDYWGQGTLVTVSS

SEQ ID NO: 1594 - protein, 129 aa, Artificial Sequence
  Description of Artificial Sequence: Synthetic polypeptide
QVQLVQSGAEVKKPGASVKVSCKASGYTFTSYAMHWVRQAPGQRLEWMGWINAGNGNTKYSQKFQGRVTITRDTSASTAYMELSSLRSEDTAVYYCAREVFEAAAGMLLPYYYYYMDVWGKGTTVTVSS

SEQ ID NO: 1595 - protein, 124 aa, Artificial Sequence
  Description of Artificial Sequence: Synthetic polypeptide
QVQLQESGPGLVKPSETLSLTCTVSGGSISSHCWNWIRQPPGKGLEWIAYIYYSGSTNYNPSLKSRVTISVDTSKNQFSLKLSSVTAADTAVYYCARQRREWLGSYYYYGMDVWGQGTTVTVSS

SEQ ID NO: 1596 - protein, 124 aa, Artificial Sequence
  Description of Artificial Sequence: Synthetic polypeptide
QLQLQESGPGLVKPSETLSLTCTVSGGSISSSSYYWGWIRQPPGRGLEWIGIIYYSGSTYYNPSLKSRVTISVDTSKNQFSLKLTSVTAADTAVYYCARVYAGFLEWLSYFDYWGQGTLVTVSS

SEQ ID NO: 1597 - protein, 125 aa, Artificial Sequence
  Description of Artificial Sequence: Synthetic polypeptide
QVQLQESGPGLVKPSQTLSLTCTVSGDSISSGAYYWSWIRQHPGKGLEWIGYIYYSGSTYYNPSLKSRVTISVDTSKNQFSLKLSSVTAADTAVYYCARARRITIFGVVGDFGVWGQGTLVTVSS

SEQ ID NO: 1598 - protein, 122 aa, Artificial Sequence
  Description of Artificial Sequence: Synthetic polypeptide
EVQLLESGGGLVQPGGSLRLSCAASGFTFSSFAMSWVRQAPGKGLEWVSAISGSGGSTYYADSVKGRFTISRDNSKNTLYLQMNSLRAEDTAVYYCAKEERVYDILTGYDYWGQGTLVTVSS

SEQ ID NO: 1599 - protein, 130 aa, Artificial Sequence
  Description of Artificial Sequence: Synthetic polypeptide
QLQLQESGPGLVKPSETLSLTCTVSGGSISSSSYYWGWIRQPPGKGLEWIGSIYYSGSTYYNPSLKSRVTISVDTSKNQFSLKLSSVTAADTAVYYCARLKNWNTIFGVVIMAPYYMDVWGKGTTVTVSS

SEQ ID NO: 1600 - protein, 118 aa, Artificial Sequence
  Description of Artificial Sequence: Synthetic polypeptide
QVQLVQSGAEVKKPGASVKVSCKVSGYTLTELSMHWVRQAPGKGLEWMGGFDPEDGETIYAQKFQARVTMTEDTSTDTAYMELSSLRSEDTAVYFCATGYYGSRFDPWGQGTLVTVSS

SEQ ID NO: 1601 - protein, 122 aa, Artificial Sequence
  Description of Artificial Sequence: Synthetic polypeptide
QVQLVQSGAEVKKPGSSVKVSCKASGGTFSSYAISWVRQAPGQGLEWMGGIIPIFGTANYAQKFQGRVTITADESTSTAYMELSSLRSEDTAVYYCARALVQGVYYYYMDVWGKGTTVTVSS

SEQ ID NO: 1602 - protein, 118 aa, Artificial Sequence
  Description of Artificial Sequence: Synthetic polypeptide
EVQLVQSGAEVKKPGESLKISCKGSGYSFTSYWIGWVRQMPGKGLEWMGIIYPGDSDTRYSPSFQGQVTISADKSISTAYLQWSSLKASDTAMYYCARSRSSDYFDYWGQGTLVTVSS

SEQ ID NO: 1603 - protein, 120 aa, Artificial Sequence
  Description of Artificial Sequence: Synthetic polypeptide
EVQLVESGGGLVQPGGSLRLSCAASGFTFSSYAMSWVRQAPGKGLEWVSAISGSGGSTYYADSVKGRFTISRDNSKNTLYLQMNSLRAEDTAVYYCAKGPRSAPDYMDVWGKGTTVTVSS

SEQ ID NO: 1604 - protein, 127 aa, Artificial Sequence
  Description of Artificial Sequence: Synthetic polypeptide
QVQLVESGGGLVKPGGSLRLSCAASGFTFSDYYMSWIRQAPGKGLEWVSYISRSGSTIYYVDSVKGRFTISRDNAKNSLYLQMNSLRAEDTAVYYCARDQRLWSTLGVYYYYYMDVWGKGTTVTVSS

SEQ ID NO: 1605 - protein, 125 aa, Artificial Sequence
  Description of Artificial Sequence: Synthetic polypeptide
QVQLQQWGAGLLKPSETLSLTCAVYGGSFSGYYWSWIRQPPGKGLEWIGEINHSGSTNYNPSLKSRVTISVDTSKNQFSLKLSSVTAADTAVYYCARRAAPAWTWFGELSPFDYWGQGTLVTVSS

SEQ ID NO: 1606 - protein, 124 aa, Artificial Sequence
  Description of Artificial Sequence: Synthetic polypeptide
QVQLQESGPGLVKPSETLSLTCTVSGGSISSHYWSWIRQPPGKGLEWIGYIYYSGSTNYNPSLKSRVTISVDTSKNQFSLKLSSVTAADTAVYYCARSARRWLQYGPDWYFDLWGRGTLVTVSS

SEQ ID NO: 1607 - protein, 128 aa, Artificial Sequence
  Description of Artificial Sequence: Synthetic polypeptide
QVQLVESGGGLVKPGGSLRLSCAASGFTFSDYYMSWIRQAPGKGLEWVSYISSSGNTIYYADSVKGRFTISRDNAKNSLYLQMNSLRAEDTAVYYCARDPPPRITIFGVGTRLGFDYWGQGTLVTVSS

SEQ ID NO: 1608 - protein, 124 aa, Artificial Sequence
  Description of Artificial Sequence: Synthetic polypeptide
QLQLQESGPGLVKPSETLSLTCTVSGGSISRSSYYWGWIRQPPGKGLEWIGSIYYSGSTYYNPSLKSRVTISVDTSKNQFSLKLSSVTAADTAVYYCARQLLGIWGSYRYIDYWGQGTLVTVSS

SEQ ID NO: 1609 - protein, 120 aa, Artificial Sequence
  Description of Artificial Sequence: Synthetic polypeptide
EVQLVQSGAEVKKPGESLKISCKGSGYSFTSYWIGWVRQMPGKGLEWMGIIYPGDSDTRYSPSFQGQVTISADKSISTAYLQWSSLKASDTAMYYCASGRLHLGELLDYWGQGTLVTVSS

SEQ ID NO: 1610 - protein, 131 aa, Artificial Sequence
  Description of Artificial Sequence: Synthetic polypeptide
QLQLQESGPGLVKPSETLSLTCTVSGGSISSSSYYWGWIRQPPGKGLEWIGSIYYSGSTYYNPSLKSRVTISVDTSKNQFSLKLSSVTAADTAVYHCARQPRRITIFGVVIMPTNNWFDPWGQGTLVTVSS

SEQ ID NO: 1611 - protein, 127 aa, Artificial Sequence
  Description of Artificial Sequence: Synthetic polypeptide
EVQLVESGGGLVQPGGSLRLSCAASGFTFSSYWMSWVRQAPGKGLEWVANIKQDGSEKYYVDSVKGRFTISRDNAKNSLYLQMNSLRAEDTAVYYCARSPEVLWFGDPVLDNWFDPWGQGTLVTVSS

SEQ ID NO: 1612 - protein, 122 aa, Artificial Sequence
  Description of Artificial Sequence: Synthetic polypeptide
EVQLVESGGGLVKPGGSLRLSCAASGFTFSSYSMNWVRQAPGKGLEWVSSISSSSSYIYYADSVKGRFTISRDNAKNSLYLQMNSLRAEDTAVYYCARDPYYDILTGYYLYWGQGTLVTVSS

SEQ ID NO: 1613 - protein, 121 aa, Artificial Sequence
  Description of Artificial Sequence: Synthetic polypeptide
EVQLVESGGGLVQPGGSLRLSCAASGFTFSSYWMHWVRQAPGKGLVWVSRINSDGSSTSYADSVKGRFTISRDNAKNTLYLQMNSLRAEDTAVYYCARDGRNIAVAGLDYWGQGTLVTVSS

SEQ ID NO: 1614 - protein, 123 aa, Artificial Sequence
  Description of Artificial Sequence: Synthetic polypeptide
QLQLQESGPGLVKPSETLSLTCTVSGGSISSSSYYWGWIRQPPGKGLEWIGSIYYSGSTYYNPSLKSRVTISVDTSKNQFSLKLSSVTAADTAVYYCARHLQPSYGGNAFDIWGQGTMVTVSS

SEQ ID NO: 1615 - protein, 124 aa, Artificial Sequence
  Description of Artificial Sequence: Synthetic polypeptide
QVQLVQSGAEVKKPGASVKVSCKASGYTFTGYYMHWVRQAPGQGLEWMGRINPNSGGTNYAQKFQGRVTMTRDTSISTAYMELSRLRSDDTAVYYCARDGCSGGSCYSWWFDPWGQGTLVTVSS

SEQ ID NO: 1616 - protein, 127 aa, Artificial Sequence
  Description of Artificial Sequence: Synthetic polypeptide
QLQLQESGPGLVKPSETLSLTCTVSGGSISSSSYYWGWIRQPPGKGLEWIGSIYYSGSTYYNPSLKSRVTISVDTSKNQFSLKLSSVTAADTAVYYCARQKTDIVVVVATEVAFDYWGQGTLVTVSS

SEQ ID NO: 1617 - protein, 126 aa, Artificial Sequence
  Description of Artificial Sequence: Synthetic polypeptide
QLQLQESGPGLVKPSETLSLTCTVSGGSISSSSYYWGWIRQPPGKGLEWIGSIYYSGSTYYNPSLKSRVTISVDTSKNQFSLKLSSVTAADTAVYYCARQVRSGIVVVTPYYFDYWGQGTLVTVSS

SEQ ID NO: 1618 - protein, 125 aa, Artificial Sequence
  Description of Artificial Sequence: Synthetic polypeptide
QVQLQESGPGLVKPSQTLSLTCTVSGGSISSGGYYWSWIRQHPGKGLEWIGYIYYSGSTYYNPSLKSRVTISVDTSKNQFSLKLSSVTAADTAVYYCARDQYDSSGYAFGAFDYWGQGTLVTVSS

SEQ ID NO: 1619 - protein, 124 aa, Artificial Sequence
  Description of Artificial Sequence: Synthetic polypeptide
EVQLVESGGGLVKPGGSLRLSCAASGFTFSSYSMNWVRQAPGKGLEWVSSISSSSSYIYYADSVKGRFTISRDNAKNSLYLQMNSLRAEDTAVYYCARDESVAHYYGSGSVDVWGQGTTVTVSS

SEQ ID NO: 1620 - protein, 125 aa, Artificial Sequence
  Description of Artificial Sequence: Synthetic polypeptide
QLQLQESGPGLVKPSETLSLTCTVSGGSISSSSYYWGWIRQPPGKGLEWIGSIYYSGSTYYNPSLKSRVTISVDTSKNQFSLKLSSVTAADTAVYYCARQFRRWLQLGPSYFDYWGQGTLVTVSS

SEQ ID NO: 1621 - protein, 117 aa, Artificial Sequence
  Description of Artificial Sequence: Synthetic polypeptide
EVQLVESGGGLVKPGGSLRLSCAASGFTFSNAWMSWVRQAPGKGLEWVGRIKTKSDGGTTDYAAPVKGRFIISRDDSKNTLYLQINSLKVEDTAIYYCSRNPFLDYWGQGTLVTVSS

SEQ ID NO: 1622 - protein, 128 aa, Artificial Sequence
  Description of Artificial Sequence: Synthetic polypeptide
QVQLQESGPGLVKPSQTLSLTCTVSGGSISSGDYYWSWIRQPPGKGLEWIGYIYYSGSTYYNPSLKSRVTISVDTSKNQFSLKLSSVTAADTAVYYCARDRWGITIFGVVNRDGMDVWGQGTTVTVSS

SEQ ID NO: 1623 - protein, 129 aa, Artificial Sequence
  Description of Artificial Sequence: Synthetic polypeptide
EVQLVESGGGLVKPGGSLRLSCAASGFTFSNAWMSWVRQAPGKGLEWVGRIKSKTDGGTTDYAAPVKGRFTISRDDSKNTLYLQMNSLKTEDTAVYYCTTLGHQYYDSSGYDYYYGMDVWGQGTTVTVS

SEQ ID NO: 1624 - protein, 122 aa, Artificial Sequence
  Description of Artificial Sequence: Synthetic polypeptide
QVQLQESGPGLVKPSETLSLTCTVSGGSISSYYWSWIRQPAGKGLEWIGRIYTSGSTNYNPSLKSRVTMSVDTSKNQFSLKLSSVTAADTAVYYCARGRLFYDSSGYYFDYWGQGTLVTVSS

SEQ ID NO: 1625 - protein, 123 aa, Artificial Sequence
  Description of Artificial Sequence: Synthetic polypeptide
QVQLQESGPGLVKPSETLSLTCTVSAGSISSHYWSWIRQPPGKGLEWIGYIYYSGSTNYNPSLRSRVTISVDTSKNQFSLKLSSVTAADTAVYYCARTLRQWLARGYYYFDYWGQGTLVTVSS

SEQ ID NO: 1626 - protein, 122 aa, Artificial Sequence
  Description of Artificial Sequence: Synthetic polypeptide
QLQLQESGPGLVKPSETLSLTCTVSGGSISSSSYYWGWIRQPPGKGLEWIGSIYYSGSTYYNPSLKSRVTISVDTSKNQFSLKLSSVTAADTAVYYCVRHRGWIQLWFFDYWGQGTLVTVSS

SEQ ID NO: 1627 - protein, 125 aa, Artificial Sequence
  Description of Artificial Sequence: Synthetic polypeptide
QVQLQESGPGLVKPSETLSLTCTVSGGSISSYYWSWIRQPPGKGLEWIGYIYYSGSTNYNPSLKSRVTISVDTSKNQFSLKLSSVTAADTAVYYCARLRAHTIFGVPIADAFDIWGQGTMVTVSS

SEQ ID NO: 1628 - protein, 128 aa, Artificial Sequence
  Description of Artificial Sequence: Synthetic polypeptide
QVQLQQWGAGLLKPSETLSLTCAVYGGSFSGYYWSWIRQPPGKGLEWIGEINHSGSTNYNPSLKSRVTISVDTSKNQFSLKLSSVTAADTAVYYCARHLSLITVIVVVTYQLDAFDIWGQGTMVTVSS

SEQ ID NO: 1629 - protein, 128 aa, Artificial Sequence
  Description of Artificial Sequence: Synthetic polypeptide
QLQLQESGPGLVKPSETLSLTCTVSGGSISSSSYYWGWIRQPPGKGLEWIGSIYYSGSTYYNPSLKSRVTISVDTSKNQFSLKLSSVTAADTAVYYCARHYSSITIFGVVSGRYMDVWGKGTTVTVSS

SEQ ID NO: 1630 - protein, 123 aa, Artificial Sequence
  Description of Artificial Sequence: Synthetic polypeptide
QVQLQESGPGLVKPSETLSLTCTVSGGSISSHYWSWIRQPPGKGLEWIGYIYYSGSTNYNPSLKSRVTISVDTSKNQFSLKLSSVTAADTAVYYCARDLRGWLQSPNWYFDLWGRGTLVTVSS

SEQ ID NO: 1631 - protein, 117 aa, Artificial Sequence
  Description of Artificial Sequence: Synthetic polypeptide
EVQLVESGGGLVQPGGSLRLSCAASGFTFSSYAMSWVRQAPGKGLEWVSAISGSGGSTYYADSVKGRFTISRDNSKNTLYLQMNSLRAEDTAVYYCAKESGSGYYNWGQGTLVTVSS

SEQ ID NO: 1632 - protein, 118 aa, Artificial Sequence
  Description of Artificial Sequence: Synthetic polypeptide
EVQLLESGGGLVQPGGSLRLSCAASGFTFSSYAMSWVRQAPGKGLEWVSAISGSGGSTYYADSVKGRFTISRDNSKNTLYLQMNSLRAEDTAVYYCAKTSGTGTLAYWGQGTLVTVSS

SEQ ID NO: 1633 - protein, 128 aa, Artificial Sequence
  Description of Artificial Sequence: Synthetic polypeptide
QLQLQESGPGLVKPSETLSLTCTVSGGSISSSSYYWGWIRQPPGKGLEWIGSIYYSGSTYYNPSLKSRVTISVDTSKNQFSLKLSSVTAADTAVYYCAREPRRVKQWLVVPYYYMDVWGKGTTVTVSS

SEQ ID NO: 1634 - protein, 126 aa, Artificial Sequence
  Description of Artificial Sequence: Synthetic polypeptide
QVQLQESGPGLVKPSETLSLTCTVSGGSISSYYWSWIRQPPGKGLEWIGYIYYSGSTNYNPSLKSRVTISVDTSKNQFSLKLSSVTAADTAVYYCARTLHSTIFGVVIMPSSFDYWGQGTLVTVSS

SEQ ID NO: 1635 - protein, 125 aa, Artificial Sequence
  Description of Artificial Sequence: Synthetic polypeptide
QVQLVQSGAEVKKPGASVKVSCKASGYTFTSYGISWVRQAPGQGLEWMGWISAYNGNTNYAQKLQGRVTMTTDTSTSTAYMELRSLRSDDTAVYYCARLHRMITFGGVIAQLDVWGKGTTVTVSS

SEQ ID NO: 1636 - protein, 122 aa, Artificial Sequence
  Description of Artificial Sequence: Synthetic polypeptide
QVQLVQSGAEVKKPGASVKVSCKVSGYTLTELSMHWVRQAPGKGLEWMGGFDPEDGETIYAQKFQGRVTMTEDTSTDTAYMELSSLRSEDTAVYYCATAGEQWLDRYYFDYWGQGTLVTVSS

SEQ ID NO: 1637 - protein, 125 aa, Artificial Sequence
  Description of Artificial Sequence: Synthetic polypeptide
QVQLVQSGAEVKKPGASVKVSCKASGYTFTSYDINWVRQATGQGLEWMGWMNPNSGNTGYAQKFQGRVTMTRNTSISTAYMELSSLRSEDTAVYYCARARGYQLLFNYYYYMDVWGKGTTVTVSS

SEQ ID NO: 1638 - protein, 124 aa, Artificial Sequence
  Description of Artificial Sequence: Synthetic polypeptide
QLQLQESGPGLVKPSETLSLTCTVSGGSISSSSYYWGWIRQPPGKGLEWIGSIYYSGSTYYNPSLKSRVTISVDTSKNQFSLKLSSVTAADTAVYYCARHKGQWLVRANWFDPWGQGTLVTVSS

SEQ ID NO: 1639 - protein, 126 aa, Artificial Sequence
  Description of Artificial Sequence: Synthetic polypeptide
QLQLQESGPGLVKPSETLSLTCTVSGGSISSSSYYWGWIRQPPGKGLEWIGSIYYSGSTYYNPSLKSRVTISVDTSKNQFSLKLSSVTAADTAVYYCARHLRGGVIVATIYGVDYWGQGTLVTVSS

SEQ ID NO: 1640 - protein, 129 aa, Artificial Sequence
  Description of Artificial Sequence: Synthetic polypeptide
QVQLVQSGAEVKKPGASVKVSCKASGYTFTSYYMHWVRQAPGQGLEWMGIINPSGGSTSYAQKFQGRVTMTRDTSTSTVYMELSSLRSEDTAVYYCAREVPTFTIFWPLGRGGGWFDPWGQGTLVTVSS

SEQ ID NO: 1641 - protein, 125 aa, Artificial Sequence
  Description of Artificial Sequence: Synthetic polypeptide
QVQLVQSGAEVKKPGASVKVSCKASGYTFTSYDINWVRQATGQGLEWMGWMNPNSGNTGYAQKFQGRVTMTRNTSISTAYMELSSLRSEDTAVYYCARGRLRITIFNRVYYFDYWGQGTLVTVSS

SEQ ID NO: 1642 - protein, 124 aa, Artificial Sequence
  Description of Artificial Sequence: Synthetic polypeptide
EVQLVESGGGLVKPGGSLRLSCAASGFTFSSYSMNWVRQAPGKGLEWVSSISSSSSYIYYADSVKGRFTISRDNAKNSLYLQMNSLRAEDTAVYYCARGHFDWLLYETYYFDYWGQGTLVTVSS

SEQ ID NO: 1643 - protein, 127 aa, Artificial Sequence
  Description of Artificial Sequence: Synthetic polypeptide
EVQLVESGGGLVQPGGSLRLSCAASGFTFSSYWMSWVRQAPGKGLEWVANIKQDGSEKYYVDSVKGRFTISRDNAKNSLYLQMNSLRAEDTAVYYCARDTVRREQWLVLDYYYMDVWGKGTTVTVSS

SEQ ID NO: 1644 - protein, 131 aa, Artificial Sequence
  Description of Artificial Sequence: Synthetic polypeptide
QLQLQESGPGLVKPSETLSLTCTVSGGSISSSSYYWGWIRQPPGKGLEWIGSIYYSGSTYYNPSLKSRVTISVDTSKNQFSLKLSSVTAADTAVYYCARQPRRITIFGVVITPTNNWFDPWGQGTLVTVSS

SEQ ID NO: 1645 - protein, 117 aa, Artificial Sequence
  Description of Artificial Sequence: Synthetic polypeptide
EVQLVESGGGLVQPGGSLRLSCAASGFTVSSNYMSWVRQAPGKGLEWVSVIYSGGSTYYADSVKGRFTISRDNSKNTLYLQMNSLRAEDTAVYYCARDYGDFYFDYWGQGTLVTVSS

SEQ ID NO: 1646 - protein, 106 aa, Artificial Sequence
  Description of Artificial Sequence: Synthetic polypeptide
EIVLTQSPATLSLSPGERATLSCRASQSVSSYLAWYQQKPGQAPRLLIYDASNRATGIPARFSGSGSGTDFTLTISSLEPEDFAVYYCQQRSNWGTFGPGTKVDIK

SEQ ID NO: 1647 - protein, 108 aa, Artificial Sequence
  Description of Artificial Sequence: Synthetic polypeptide
EIVLTQSPGTLSLSPGERATLSCRASQSVSSSYLAWYQQKPGQAPRLLIYGASSRATGIPDRFSGSGSGTDFTLTISRLEPEDFAVYYCQQYGSSPWTFGQGTKVEIK

SEQ ID NO: 1648 - protein, 110 aa, Artificial Sequence
  Description of Artificial Sequence: Synthetic polypeptide
QSVLTQPPSVSAAPGQKVTISCSGSSSNIGNNYVSWYQQLPGTAPKLLIYDNNKRPSGIPDRFSGSKSGTSATLGITGLQTGDEADYYCGTWDSSLSEWVFGGGTKLTVL

SEQ ID NO: 1649 - protein, 109 aa, Artificial Sequence
  Description of Artificial Sequence: Synthetic polypeptide
EIVLTQSPATLSLSPGERATLSCRASQSVSSYLAWYQQKPGQAPRLLIYDASNRATGIPARFSGSGSGTDFTLTISSLEPEDFAVYYCQQRSNWPPRLTFGGGTKVEIK

SEQ ID NO: 1650 - protein, 113 aa, Artificial Sequence
  Description of Artificial Sequence: Synthetic polypeptide
DIVMTQSPDSLAVSLGERATINCKSSQSVLYSSNNKNYLAWYQQKPGQPPKLLIYWASTRESGVPDRFSGSGSGTDFTLTISSLQAEDVAVYYCQQYYSTPFTFGPGTKVDIK

SEQ ID NO: 1651 - protein, 110 aa, Artificial Sequence
  Description of Artificial Sequence: Synthetic polypeptide
QSVLTQPPSASGTPGQRVTISCSGSSSNIGSNYVYWYQQLPGTAPKLLIYRNNQRPSGVPDRFSGSKSGTSASLAISGLRSEDEADYYCAAWDDSLSGWVFGGGTKLTVL

SEQ ID NO: 1652 - protein, 107 aa, Artificial Sequence
  Description of Artificial Sequence: Synthetic polypeptide
DIQLTQSPSFLSASVGDRVTITCRASQGISSYLAWYQQKPGKAPKLLIYAASTLQSGVPSRFSGSGSGTEFTLTISSLQPEDFATYYCQQLNSYPLTFGGGTKVEIK

SEQ ID NO: 1653 - protein, 106 aa, Artificial Sequence
  Description of Artificial Sequence: Synthetic polypeptide
SYELTQPPSVSVSPGQTASITCSGDKLGDKYACWYQQKPGQSPVLVIYQDSKRPSGIPERFSGSNSGNTATLTISGTQAMDEADYYCQAWDSSTVVFGGGTKLTVL

SEQ ID NO: 1654 - protein, 108 aa, Artificial Sequence [sequence omitted]

SEQ ID NO: 1655 - protein, 108 aa, Artificial Sequence; identical to SEQ ID NO: 1647
  Description of Artificial Sequence: Synthetic polypeptide

SEQ ID NO: 1656 - protein, 107 aa, Artificial Sequence
  Description of Artificial Sequence: Synthetic polypeptide
DIQMTQSPSSLSASVGDRVTITCRASQGISNYLAWFQQKPGKAPKSLIYAASSLQSGVPSKFSGSGSGTDFTLTISSLQPEDFATYYCQQYNSYPPTFGQGTKLEIK

SEQ ID NO: 1657 - protein, 106 aa, Artificial Sequence
  Description of Artificial Sequence: Synthetic polypeptide
DIQLTQSPSFLSASVGDRVTITCRASQGISSYLAWYQQKPGKAPKLLIYAASTLQSGVPSRFSGSGSGTEFTLTISSLQPEDFATYYCQQLNSYPTFGQGTKVEIK

SEQ ID NO: 1658 - protein, 112 aa, Artificial Sequence
  Description of Artificial Sequence: Synthetic polypeptide
QSVLTQPPSVSGAPGQRVTISCTGSSSNIGAGYDVHWYQQLPGTAPKLLIYGNSNRPSGVPDRFSGSKSGTSASLAITGLQAEDEADYYCQSYDSSLSGSGVFGTGTKVTVL

SEQ ID NO: 1659 - protein, 106 aa, Artificial Sequence
  Description of Artificial Sequence: Synthetic polypeptide
SYELTQPPSVSVSPGQTASITCSGDKLGDKYACWYHQKPGQSPVLVIYQDTKRPSGIPERFSASNSGNTATLTISGTQALDEADYYCQAWDSSIVVFGGGTKLTVL

SEQ ID NO: 1660 - protein, 108 aa, Artificial Sequence
  Description of Artificial Sequence: Synthetic polypeptide
EIVLTQSPGTLSLSPGERATLSCRASQSVSSSYLAWYQQKPGQAPRLLIYGASSRATGIPDRFSGSGSGTDFTLTISRLEPEDFAVYYCQQYGSSPLTFGQGTRLEIK

SEQ ID NO: 1661 - protein, 108 aa, Artificial Sequence
  Description of Artificial Sequence: Synthetic polypeptide
EIVLTQSPGTLSLSPGERATLSCRASQSVSSSYLAWYQQKPGQAPRLLIYGASSRATGIPDRFSGSGSGTDFTLTISRLEPEDFAVYYCQQYGSSPLTFGGGTKVEIK

SEQ ID NO: 1662 - protein, 108 aa, Artificial Sequence
  Description of Artificial Sequence: Synthetic polypeptide
SSELTQDPAVSVALGQTVRITCQGDSLRSYYASWYQQKPGQAPVLVIYGKNNRPSGIPDRFSGSSSGNTASLTITGTQAEDEADYYCNSRDSSGNHGVFGTGTKVTVL

SEQ ID NO: 1663 - protein, 107 aa, Artificial Sequence; identical to SEQ ID NO: 1652
  Description of Artificial Sequence: Synthetic polypeptide

SEQ ID NO: 1664 - protein, 108 aa, Artificial Sequence; identical to SEQ ID NO: 1647
  Description of Artificial Sequence: Synthetic polypeptide

SEQ ID NO: 1665 - protein, 112 aa, Artificial Sequence
  Description of Artificial Sequence: Synthetic polypeptide
EIVMTQSPLFLPVTPGEPASISCRSSQSLLHSNGYNYLDWYLQKPGQSPQLLIYLGSNRASGVPDRFSGSGSGTDFTLKISRVEAEDVGVYYCMQALQTPQTFGQGTKVEIK

SEQ ID NO: 1666 - protein, 108 aa, Artificial Sequence
  Description of Artificial Sequence: Synthetic polypeptide
EIVLTQSPGTLSLPPGERATLSCRASQSVNKFVLAWYQHKPGQAPRLLIYGASTRATGIPDRFSGSGSGTDFTLTINRLEPEDLAVYYCQLYDRSPPPIGQGTKVEIK

SEQ ID NO: 1667 - protein, 108 aa, Artificial Sequence
  Description of Artificial Sequence: Synthetic polypeptide
EIVLTQSPATLSLSPGERATLSCRASQSVSSYLAWYQQRPGQAPRLLIYDASSRATGIPVRFSGSGSGTDFTLTISSLEPEDFAVYYCQQRSDWPLLTFGGGTKVEIK

SEQ ID NO: 1668 - protein, 107 aa, Artificial Sequence
  Description of Artificial Sequence: Synthetic polypeptide
ESVLTQSPGTLSLSPGETVTLSCRASQSITNNYLAWYQQKPGQAPRLVVYHASKRASGIPDRFSGSGSGTDFALTISRLEPEDFAVYYCQQFGTFGTFGGGTKLEIK

SEQ ID NO: 1669 - protein, 107 aa, Artificial Sequence
  Description of Artificial Sequence: Synthetic polypeptide
DIQMTQSPPSLSASVGDRVTFTCRASQDITNSLAWFQQRPGKAPKSLIYAASTLHSGVPSKFSGSGSGTDFTLTITSLQPEDVATYYCQQYKTYPFTFGQGTRLEIK

SEQ ID NO: 1670 - protein, 107 aa, Artificial Sequence
  Description of Artificial Sequence: Synthetic polypeptide
EIVLTQSPATLSLSPGERATLSCRASQSVSAYFAWYQQKPGQAPRLLIYDATNRATGIPARFSGSGFGTDFTLTISNLEPDDFAVYYCQQRSFWPLTFGGGTKVEIK

SEQ ID NO: 1671 - protein, 111 aa, Artificial Sequence
  Description of Artificial Sequence: Synthetic polypeptide
QSVLTQPPSVSGAPGQRVTISCTGHNSNIGAGSDVHWYQQLPGTAPKLLIYGNRNRPSGVPDRFSGSKSGTSGSLAITGLQTEDEADYYCQSFDSSLNVYVFGTGTKVTVL

SEQ ID NO: 1672 - protein, 108 aa, Artificial Sequence
  Description of Artificial Sequence: Synthetic polypeptide
SYELTQPPSVSVSPGQTASITCSGDKLGDKYACWYQQKPGQSPVLVIYQDSKRPSGIPERFSGSNSGNTATLTISGTQAMDEADYYCQAWDSSTAWEVFGGGTKLTVL

SEQ ID NO: 1673 - protein, 112 aa, Artificial Sequence
  Description of Artificial Sequence: Synthetic polypeptide
DIVMTQSPLSLPVTPGEPASISCRSSQSLLHSNGYNYLDWYLQKPGQSPQLLIYLGSNRASGVPDRFSGSGSGTDFTLKISRVEAEDVGVYYCMQALQTPRTFGQGTKLEIK

SEQ ID NO: 1674 - protein, 107 aa, Artificial Sequence
  Description of Artificial Sequence: Synthetic polypeptide
DIQMTQSPSSLSASVGDRVTITCRASQSISSYLNWYQQKPGKAPKLLIYAASSLQSGVPSRFSGSGSGTDFTLTISSLQPEDFATYYCQQSYSTPQTFGQGTKVEIK

SEQ ID NO: 1675 - protein, 109 aa, Artificial Sequence
  Description of Artificial Sequence: Synthetic polypeptide
QSALTQEASVSGTVGQKVTLSCTGNTNNIGSHAVGWYQQISHGAPKTVMFRNSLPSGIPGRFSGSQSGTTASLTISGLQPEDEADYYCSTWDNSLSAVVFGGGTRLTVL

SEQ ID NO: 1676 - protein, 108 aa, Artificial Sequence
  Description of Artificial Sequence: Synthetic polypeptide
EIVMTQSPATLSVSPGERATLSCRASQSVSSNLAWYQQKPGQAPRLLIYGASTRATGIPARFSGSGSGTEFTLTISSLQSEDFAVYYCQQYNNWPPITFGQGTRLEIK

SEQ ID NO: 1677 - protein, 109 aa, Artificial Sequence
  Description of Artificial Sequence: Synthetic polypeptide
SSELTQDPAVSVALGQTVRITCQGDSLRKYYPTWYQQKPGQAPVLVIYGKNTRHSGIPDRFSGSSSGNTASLTITGAQAEDEADYYCNSRDSSDSRNWVFGGGTKLTIL

SEQ ID NO: 1678 - protein, 108 aa, Artificial Sequence
  Description of Artificial Sequence: Synthetic polypeptide
SYELTQPPSVSVSPGQTARITCSGDALPKKYAYWYQQRSGQAPVLVIYEDTKRPSGIPERFSGSSSGTVASLTISGAQVEDEADYYCYSTDSSGYHEVFGGGTKLTVL

SEQ ID NO: 1679 - protein, 106 aa, Artificial Sequence
  Description of Artificial Sequence: Synthetic polypeptide
DIQMTQSPSSLSAFVGDRVTITCRASQSINTYLNWYQQRPGKAPKLLIFLASSLQSGVPSRFRGGGSGTDFTLTISSLQPEDFATYYCQQSYRSWTFGQGTKVEIK

SEQ ID NO: 1680 - protein, 107 aa, Artificial Sequence
  Description of Artificial Sequence: Synthetic polypeptide
AIRMTQSPSSLSASTGDRVTITCRASQAITNYLAWYQQKPGKAPKLLIASASTLQSGVPSRFSGSGSGTDFTLTISSLQSEDFASYYCQQYYSYPLTFGGGTKVEIK

SEQ ID NO: 1681 - protein, 107 aa, Artificial Sequence
  Description of Artificial Sequence: Synthetic polypeptide
EIVLTQSPATLSLSPGERATLSCRASQSVRNFFAWYQQKPGQAPRLLIYGASNRATGIPARFSGSGSGTDFTLTISSLEPEDFAVYFCQQRFDWPLTFGAGTKVEIK

SEQ ID NO: 1682 - protein, 108 aa, Artificial Sequence
  Description of Artificial Sequence: Synthetic polypeptide
SYELTQPPSVSVSPGQTARITCSGDALPKKYAYWYQQKSGQAPVLVIYEDSKRPSGIPERFSGSSSGTMATLTISGAQVEDDSDYYCFSTDSSGNHGVFGGGTRLTVL

SEQ ID NO: 1683 - protein, 112 aa, Artificial Sequence
  Description of Artificial Sequence: Synthetic polypeptide
QSVLTQPPSVSGAPGQRVTISCAGSSSNIGTGYDVHWYQQLPGGAPKLLIYGNTNRPSGVPDRFSGSRSGTSASLAITGLQAEDEADYYCQSYDSSLAGSRVFGGGTKLTVL

SEQ ID NO: 1684 - protein, 108 aa, Artificial Sequence
  Description of Artificial Sequence: Synthetic polypeptide
SSELTQDPAVSVALGQTIRITCQGDSLRNYYASWYQQKPGQAPLLVIYGKNNRPSGIPDRFSGSTSINSASLTITGAQAEDEADYYCNSRDANTNHVLFGGGTKLTVV

SEQ ID NO: 1685 - protein, 109 aa, Artificial Sequence
  Description of Artificial Sequence: Synthetic polypeptide
EIVLTQSPGTLSLSPGERATLSCRASQSVSSSYLAWYQQKPGQAPRLLIYGASSRATGIPDRFSGSGSGTDFTLTISRLEPEDFAVYYCQQYGSSPPGTFGQGTRLEIK

SEQ ID NO: 1686 - protein, 108 aa, Artificial Sequence
  Description of Artificial Sequence: Synthetic polypeptide
EIVLTQSPGTLSLSPGERATLSCRASQSLSSSNLAWYQQKPGQAPRLLIYGASSRATGIPDRFSGSGSGTDFTLTISRLEPEDFAVYYCQQYGSSPFTFGPGTKVDIK

SEQ ID NO: 1687 - protein, 113 aa, Artificial Sequence
  Description of Artificial Sequence: Synthetic polypeptide
QSALTQPASVSGSPGQSITISCTGTSSDVGGYNYVSWYQQHPGKAPKLMIYDVSNRPSGVSNRFSGSKSGNTASLTISGLQAEDEADYYCTSYTSSSTLEGWVFGGGTKLTVL

SEQ ID NO: 1688 - protein, 107 aa, Artificial Sequence
  Description of Artificial Sequence: Synthetic polypeptide
DIQMTQSPSSLSASVGDRVTITCRASHGISTWLAWYQLKPGKAPKSLIYAASNLQSGVPSRFSGSGSGTDFTLTISSLQPEDFATYYCHQYNSYPFTFGGGTKVEIK

SEQ ID NO: 1689 - protein, 109 aa, Artificial Sequence
  Description of Artificial Sequence: Synthetic polypeptide
SSELTQDPAVSVASGQTVRITCQGDSLRSYYASWYQQKPGQAPVLVIYGKNNRPSGIPDRFSGSSSGNTASLTITGAQAEDEADYYCNSRDSSGNHLVVFGGGTKLTVL

SEQ ID NO: 1690 - protein, 108 aa, Artificial Sequence; identical to SEQ ID NO: 1661
  Description of Artificial Sequence: Synthetic polypeptide

SEQ ID NO: 1691 - protein, 108 aa, Artificial Sequence
  Description of Artificial Sequence: Synthetic polypeptide
SSELTQDPAVSVALGQTVRITCQGDSLRSYYASWYQQKPGQAPVLVIYGKNNRPSGIPDRFSGSSSGNTASLTITGAQAEDEADYYCNSRDSSGNHRVFGGGTKLTVL

SEQ ID NO: 1692 - protein, 112 aa, Artificial Sequence
  Description of Artificial Sequence: Synthetic polypeptide
DVVMTQTPLSLSVTPGQPASISCKSSQSLLQSDGKTYLYWYLQKPGQPPQLLIYEVSKRFSGVPDRFSGSGSGTDFTLKISRVEADDVGVYYCMQSIQVPITFGPGTKVDIK

SEQ ID NO: 1693 - protein, 106 aa, Artificial Sequence; identical to SEQ ID NO: 1653
  Description of Artificial Sequence: Synthetic polypeptide

SEQ ID NO: 1694 - protein, 111 aa, Artificial Sequence
  Description of Artificial Sequence: Synthetic polypeptide
QSALTQPPSVSGSPGQSVTISCTGTSSDIGGYNYVSWYQQHPGKGPKLMIYDVNKRPSGVPDRFSGSKSGNTASLTISGLQAEDEAHYSCSSYAGSYTYVVFGGGTQLTVL

SEQ ID NO: 1695 - protein, 112 aa, Artificial Sequence
  Description of Artificial Sequence: Synthetic polypeptide
DVVMAQSPLSLSVTLGQPASISCRSSQSLLYSNGNTYLSWFQQRPGQSPRRLIYKVSIRDSGVPDRFSGSGSDTDFTLKITRVEAEDVGIYYCVQGTHWPFTFGPGTKVDIK

SEQ ID NO: 1696 - protein, 113 aa, Artificial Sequence
  Description of Artificial Sequence: Synthetic polypeptide
DIVMTQTPLSLPVTPGEPASISCRSSQSLLDSEDGNTYLDWYLQKPGQSPQLLIYTLSYRASGVPDRFIGSGSGTDFTLEISRVEAEDVGIYYCMQSMEFPWTFGPGTKVEIK

SEQ ID NO: 1697 - protein, 108 aa, Artificial Sequence
  Description of Artificial Sequence: Synthetic polypeptide
EVVLTQSPGTLSLSPGERATLSCRASQSVTSSYLAWYQQKAGQAPRLLIYGASSRATGIPDRFSGSGSGTDFTLTISRLDPEDFAVYYCQQYGSSPLTFGGGTKVEIK

SEQ ID NO: 1698 - protein, 109 aa, Artificial Sequence
  Description of Artificial Sequence: Synthetic polypeptide
HFMLTQPQSVSESPGETVIISCTRSSGSIASNYVQWYQQRPGSAPTCVIYEDNQRPSGVPDRFSGSIDSSSNTASLTISGLKTEDEGDYYCQSYDKGWVFGGGTKLTVL

SEQ ID NO: 1699 - protein, 108 aa, Artificial Sequence
  Description of Artificial Sequence: Synthetic polypeptide
EIELTQSPGTLSLSPGERATLSCRASQSVSSNYLAWYQQKPGQAPRLLIYGASSRATGIPDRLSGSGSGTDFTLTISSLEPEDFAVYHCHQYGTSPHTFGQGTKLEIK

SEQ ID NO: 1700 - protein, 107 aa, Artificial Sequence
  Description of Artificial Sequence: Synthetic polypeptide
EIVLTQSPATLSLSPGERATLSCRASQSVTTFLGWYQQKPGQAPRLLIYDASNRAPGIPARFSGSGSGTDFTLTISSLEPEDVGVYYCQQRYNWPLTFGPGTKVEIK

SEQ ID NO: 1701 - protein, 110 aa, Artificial Sequence
  Description of Artificial Sequence: Synthetic polypeptide
QSVLTQPPSVSAAPGQKVTISCSGSSSNIGKNYVSWYRQFPGTAPKLLIYDNNKRPSGIPDRFSGSKSDTSATLGITGLQTGDEADYYCVTWDSSLSAGVFGGGTKLTVL

SEQ ID NO: 1702 - protein, 107 aa, Artificial Sequence
  Description of Artificial Sequence: Synthetic polypeptide
DIQMTQSPSTLSASVGDRVTITCRASQSISSWLAWYQQKPGKAPKLLIYKASSLESGVPSRFSGSGSGTEFTLTISSLQPDDFATYYCQQYNSYPYTFGQGTKLEIK

SEQ ID NO: 1703 - protein, 109 aa, Artificial Sequence
  Description of Artificial Sequence: Synthetic polypeptide
QIVLTQSPDTLSLSPGERATLSCRASQTVSRNYLAWYQHKPGQAPRFLMYSASIRATDTPDRFSGSGSGTDFTLTISRLEPEDFAVYYCQHYGSSPPYTFGQGTKLEIK

SEQ ID NO: 1704 - protein, 107 aa, Artificial Sequence
  Description of Artificial Sequence: Synthetic polypeptide
AIQMTQSPSSLSASVGDRVTITCRASQVITNDLGWYQQRPGKAPKLLIYATSRLQSGVPSRFSGSGSGTDFTLTISSLQPEDFATYYCLQDSNFPLTFGGGTKVEIK

SEQ ID NO: 1705 - protein, 108 aa, Artificial Sequence
  Description of Artificial Sequence: Synthetic polypeptide
SSELTQDPAVSVALGQTVRITCQGDSLRSYYASWYQQKPGQAPVLVIYGKNNRPSGIPDRFSGSSSGNTASLTITGAQAEDEADYYCNSRDSSGNHWVFGGGTKLTVL

SEQ ID NO: 1706 - protein, 108 aa, Artificial Sequence
  Description of Artificial Sequence: Synthetic polypeptide
EIVMTQSPATLSVSPGERATLSCRASQSVSSNLAWYQQKPGQAPRLLIYGASTRATGIPARFSGSGSGTEFTLTISSLQSEDFAVYYCQQYNNWPPYTFGQGTKLEIK

SEQ ID NO: 1707 - protein, 110 aa, Artificial Sequence
  Description of Artificial Sequence: Synthetic polypeptide
QSGLTQPASVSGSPGQSITISCTATSSDIGNYNYVSWYQQHPGKAPKLMIYEVSSRPSGVSNRFSGSKSGNTASLTISGLRAEDEANYYCSSYTTSRTYVFGTGTKVTVL

SEQ ID NO: 1708 - protein, 106 aa, Artificial Sequence
  Description of Artificial Sequence: Synthetic polypeptide
DIQMTQSPSTLSASVGDRVTITCRASESVSTWLAWYQQKPGKAPQLLIYKASNLESGVPSRFSGSGSGTEFTLTISSLQPDDSATYYCQQYSTYSTFGQGTKVEIK

SEQ ID NO: 1709 - protein, 107 aa, Artificial Sequence
  Description of Artificial Sequence: Synthetic polypeptide
EIVLTQSPATLSVSPGERATLSCRTSQIVGVNLAWYQQRPGQAPRLLIYGASTRATGIPDRFSGGGSGTQFTLTIISLQSEDLAVYYCQQYDNWPRTFGRGTKVEIK

SEQ ID NO: 1710 - protein, 112 aa, Artificial Sequence
  Description of Artificial Sequence: Synthetic polypeptide
QSVLTQPPSVSGTPGQRVSISCSGSSSNIGSNFVHWYQQLPGAAPQLLICRNNERPSGVPDRFSGSKSGTSASLAISGLRSEDEADYYCAAWDDTLSSPNWVFGGGTKLTVL

SEQ ID NO: 1711 - protein, 107 aa, Artificial Sequence
  Description of Artificial Sequence: Synthetic polypeptide
DIQMTQSPSSLSASVGDRVTITCRASQGISNYLAWYQQKPGKVPKLLIYAASTLQSGVPSRFSGSGSGTDFTLTISSLQPEDVATYYCQKYNSAPLTFGGGTKVEIK

SEQ ID NO: 1712 - protein, 109 aa, Artificial Sequence
  Description of Artificial Sequence: Synthetic polypeptide
EIVLTQSPGTLSLSPGERATLSCRASQSLGSSYLAWYQQKPGQTPRLLIYGASTRATGIPDRFSGSGSGTDFTLTISRLEPEDFAMYYCQQYDSPPPYTFGQGTKLEIK

SEQ ID NO: 1713 - protein, 108 aa, Artificial Sequence
  Description of Artificial Sequence: Synthetic polypeptide
EIVMTQSPATLSVSPGERATLSCRASQSVSSNLAWYQQKPGQAPRLLIYGASTRATGIPARFSGSGSGTEFTLTISSLQSEDFAVYYCQQYNNWLSYTFGQGTKLEIK

SEQ ID NO: 1714 - protein, 110 aa, Artificial Sequence
  Description of Artificial Sequence: Synthetic polypeptide
QSALTQPASVSGSPGQSITISCTGTSSDVGGYNYVSWYQQHPGKAPKLMIYDVSNRPSGVSNRFSGSKSGNTASLTISGLQAEDEADYYCSSYTSSSTLIFGGGTKLTVL

SEQ ID NO: 1715 - protein, 107 aa, Artificial Sequence
  Description of Artificial Sequence: Synthetic polypeptide
EIVLTQSPGTLSLSPGERATLSCRASQSVSSSYLAWYQQKPGQAPRLLIYGASSRATGIPDRFSGSGSGTDFSLTISRLEPEDFAVYYCHQYGSSPTFGQGTKVEIK

SEQ ID NO: 1716 - protein, 111 aa, Artificial Sequence
  Description of Artificial Sequence: Synthetic polypeptide
QSALTQPASVSGSPGQSITISCTGTSSDVGGYNYVSWYQQHPGKAPKLMIYDVSKRPSGVSNRFSGSKSGNTASLTISGLQAEDEADYYCCSYAGSSSPWVFGGGTKLTVL

SEQ ID NO: 1717 - protein, 107 aa, Artificial Sequence
  Description of Artificial Sequence: Synthetic polypeptide
EIVMTQSPATLSVSPGERATLSCRASQSVSSNLAWYQQKPGQAPRLLIYGASTRATGIPARFSGSGSGTEFTLTISSLQSEDFAVYYCQQYNNWPRTFGQGTKVEIK

SEQ ID NO: 1718 - protein, 107 aa, Artificial Sequence
  Description of Artificial Sequence: Synthetic polypeptide
ETVMTQSPATLSVSPGEGATLSCRASQSVSSNLAWYQQKPGQAPRLLIYGASTRATGFPARFSGSGSGTEFTLTISSMQSEDFAVYFCQQYHNWPPAFGPGTRVEIK

SEQ ID NO: 1719 - protein, 107 aa, Artificial Sequence
  Description of Artificial Sequence: Synthetic polypeptide
SYELTQPPSMSVSPGQTASITCSGYILGDVSASWYQQKPGQSPVLIIYQDTKRPSGIPDRFSGSDSGNTATLTISGTQATDEADYYCQAWDSRTHVVFGGGTKLTVL

SEQ ID NO: 1720 - protein, 110 aa, Artificial Sequence
  Description of Artificial Sequence: Synthetic polypeptide
EIVLTQSPGTLSLSPGERATLSCRASQSVSSSYLAWYQQKPGQAPRLLIYGASSRATGIPDRFSGSGSGTDFTLTISRLEPEDFAVYYCQQYGSSPPKYTFGQGTKLEIK

SEQ ID NO: 1721 - protein, 107 aa, Artificial Sequence
  Description of Artificial Sequence: Synthetic polypeptide
DIQMTQSPSSLSASVGDRVTITCRASQSISTYLNWYQQKPGKAPKLLIYAASSLQSGVPSRFSARGSGADFTLTISSLQPEDFATYFCQQSYSAPPTFGQGTKVEIK

SEQ ID NO: 1722 - protein, 110 aa, Artificial Sequence
  Description of Artificial Sequence: Synthetic polypeptide
QSALTQPRSVSGSPGQSVTISCTGTSSDVGGYNYVSWYQQHPGKAPKLMIYDVSKRPSGVPDRFSGSKSGNTASLTISGLQAEDEADYYCCSYAGSYTLLFGGGTKLIVL

SEQ ID NO: 1723 - protein, 116 aa, Artificial Sequence
  Description of Artificial Sequence: Synthetic polypeptide
QPVLTQPPSASASLGASVTLTCTLSSGYYSYKVDWYQQRPGKGPRFVMRVGTGGIVKAKGDGIPDRFSVLGSGLNRSLTIKDIQEEDEGDYHCGADHGSGGNFVWVFGGGTKLTVL

SEQ ID NO: 1724 - protein, 109 aa, Artificial Sequence
  Description of Artificial Sequence: Synthetic polypeptide
EIVLTQSPGTLSLSPGERATLSCRASQSVSSSYLAWYQQKPGQAPRLLIYGASSRATGIPDRFSGSGSGTDFTLTISRLEPEDFAVYYCQQYGSSPPYTFGQGTKLEIK

SEQ ID NO: 1725 - protein, 107 aa, Artificial Sequence
  Description of Artificial Sequence: Synthetic polypeptide
DIQMTQSPSSVSASVGDRVTITCRASQGISSRLAWYQQKPGKAPKLLIYASSTLQSGVPSRFSGSGSGTDFTLTISSLQPEDFATYYCQQASSLPYTFGQGTKLEIK

SEQ ID NO: 1726 - protein, 108 aa, Artificial Sequence
  Description of Artificial Sequence: Synthetic polypeptide
SSELTQDAAVSVALGQTVKITCQGDSLRRYYASWYQQKPGQAPVLVMYGKNKRPSGIPDRFSVSTSLTTASLTITGAQAEDEADYYCNSRDTSGDHRVFGGGTKLTVL

SEQ ID NO: 1727 - protein, 108 aa, Artificial Sequence
  Description of Artificial Sequence: Synthetic polypeptide
SYVLTQPPSLSVAPGKTATITCGKNNIESESVHWYQSKPGQAPVLVVYDDSDRPSGIPERFSGSNSGNTATLTISRVEAGDEADYYCQVWDSTGVHVVFGGGTKLTVL

SEQ ID NO: 1728 - protein, 107 aa, Artificial Sequence
  Description of Artificial Sequence: Synthetic polypeptide
DILLTQSPATLSLSPGARVTLSCRASQNVGENFAWYQRRPGQSPRLLIYGKSIRATDVPARFSGSGSGTEFTLAISSLQSEDFAVYYCQQYDLFPWTFGQGTTIEFK

SEQ ID NO: 1729 - protein, 109 aa, Artificial Sequence
  Description of Artificial Sequence: Synthetic polypeptide
EIVLTQSPGTLSLSPGERATLSCRASQSVSNSYLAWYQQKPGQAPRLVIYGASSRATGIPDRFSGSGSGTDFTLTISRLEPEDFAVYYCQQYGSSRGITFGQGTRLEIK

SEQ ID NO: 1730 - protein, 112 aa, Artificial Sequence
  Description of Artificial Sequence: Synthetic polypeptide
DVVMTQTPLSLSVTPGQPASISCKSSQSLLHSDGKTFLYWYLQKPGQPPQLLIYEVSNRFSGVPDRFTGSGSGTDFTLKISRVEAEDVGVYYCMQSIQLPLTFGGGTKVEIK

SEQ ID NO: 1731 - protein, 107 aa, Artificial Sequence
  Description of Artificial Sequence: Synthetic polypeptide
DIQLTQSPSSLSASVGDRVSITCRASQNIDTYLNWYQQKPGKAPKLLISAASSLRSGVPSRFSGSGSGTHFTLTISSLQPEDVTTYYCQQSYSIPWTFGQGTKVEIR

SEQ ID NO: 1732 - protein, 108 aa, Artificial Sequence
  Description of Artificial Sequence: Synthetic polypeptide
EIVMTQSPAILSVSPGERATLSCRASQSVANNLAWYQQKPGQAPRLVIFTASTRAPGVPDRFSASGSGTEFTLTINSLQSEDFAVYYCQQYYDWPPVTFGGGTKVEIK

SEQ ID NO: 1733 - protein, 107 aa, Artificial Sequence
  Description of Artificial Sequence: Synthetic polypeptide
DIQMTQSPSSVSASVGDRVTITCRASQGISSWLAWYQQKPGKAPKLLIYAASSLQSGVPSRFSGSGSGTDFTLTISSLQPEDFATYYCQQANSFPLLFGGGTKVEIK

SEQ ID NO: 1734 - protein, 109 aa, Artificial Sequence
  Description of Artificial Sequence: Synthetic polypeptide
QSALTQEASVSATVGQKVTLSCTGNTNNIGGYAVGWHQQISHGAPKTVMFGNSLPSGIPDRFSGSKSGTTASLIISGLQPEDEADYYCSTWDSSLGAVLFGGGTKLTVL

SEQ ID NO: 1735 - protein, 112 aa, Artificial Sequence
  Description of Artificial Sequence: Synthetic polypeptide
QSVLTQPPSVSGAPGQGVTISCTGTSSNIGAGYGVHWYQQFPGTAPILIIYDNTNRPSGVPDRFSGSRSGASASLAITDLQADDEADYYCHSYDTTLSGQGVFGGGTKLTVL

SEQ ID NO: 1736 - protein, 106 aa, Artificial Sequence; identical to SEQ ID NO: 1653
  Description of Artificial Sequence: Synthetic polypeptide

SEQ ID NO: 1737 - protein, 110 aa, Artificial Sequence
  Description of Artificial Sequence: Synthetic polypeptide
QSVLAQPPSASETPGQSVTISCSGSTSNIGSNFVYWYQQLPGTAPKLLIYRNTQRPSGVPDRFSGSKSATSASLAISGLRPEDEADYYCAAWDDSLSGGVFGTGTKVTVL

SEQ ID NO: 1738 - protein, 108 aa, Artificial Sequence
  Description of Artificial Sequence: Synthetic polypeptide
SYELTQPPSVSVSPGQTARITCSGDALPKQYAYWYQQKPGQAPVLVIYKDSERPSGIPERFSGSSSGTTVTLTISGVQAEDEADYYCQSADSSGTFVVFGGGTKLTVL

SEQ ID NO: 1739 - protein, 113 aa, Artificial Sequence
  Description of Artificial Sequence: Synthetic polypeptide
DIVMTQSPDSLAVSLGERATLNCKSSQSVLYSSNNKNYLAWYQQKPGQPPKLLFYWASTRQSGVPDRFSGSGSGTDFTLTISSLQAEDGAVYYCQQYHKTPHTFGQGTKLEIK

SEQ ID NO: 1740 - protein, 113 aa, Artificial Sequence
  Description of Artificial Sequence: Synthetic polypeptide
DVVMTQSPLSLPVTLGQPASISCRSSQSLVHSDGNTYLNWFQQRPGQSPRRLIYKVSNRDSGVPDRFSGSGSGTDFTLKISRVEAEDVGVYYCMQGTHWPPWTFGQGTKVEIK

SEQ ID NO: 1741 - protein, 112 aa, Artificial Sequence
  Description of Artificial Sequence: Synthetic polypeptide
DIMMTQTPLSSPVTLGQPASISCRSSQSLVHSDGNTYLSWLQQRPGQPPRLLIYKISNRFSGVPDRFSGSGAGTDFTLKISRVEAEDVGVYYCMQATQFPWTFGQGTKVEIK

SEQ ID NO: 1742 - protein, 107 aa, Artificial Sequence
  Description of Artificial Sequence: Synthetic polypeptide
DIQMTQSPSSLSASVGDRVTITCRASQSISSYLNWYQQKPGKAPKLLIYAASSLQSGVPSRFSGSGSGTDFTLTISSLQPEDFATYYCQQSYSTPRTFGQGTKVEIK

SEQ ID NO: 1743 - protein, 107 aa, Artificial Sequence; identical to SEQ ID NO: 1742
  Description of Artificial Sequence: Synthetic polypeptide

SEQ ID NO: 1744 - protein, 108 aa, Artificial Sequence
  Description of Artificial Sequence: Synthetic polypeptide
EIVMTQSPATLSVSPGERATLSCRASQSVSSNLAWYQQKPGQAPRLLIYGASTRATGIPARFSGSGSGTEFTLTISSLQSEDFAVYYCQQYNNWPPLTFGGGTKVEIK

SEQ ID NO: 1745 - protein, 108 aa, Artificial Sequence
  Description of Artificial Sequence: Synthetic polypeptide
DIQMTQSPSSLSASVGDRVTITCQASQDISNYLNWYQQKPGKAPKLLIYDASNLETGVPSRFSGSGSGTDFTFTISSLQPEDIATYYCQQYDNLPPLTFGGGTKVEIK

SEQ ID NO: 1746 - protein, 108 aa, Artificial Sequence
  Description of Artificial Sequence: Synthetic polypeptide
SYVLTQPPSVSVAPGKTARITCGGNNIGSKSVHWYQQKPGQAPVLVVYDDSDRPSGIPERFSGSNSGNTATLTISRVEAGDEADYYCQVWDSSSDPWVFGGGTKLTVL

SEQ ID NO: 1747 - protein, 110 aa, Artificial Sequence
  Description of Artificial Sequence: Synthetic polypeptide
QSALTQPASVSGSPGQSITISCTGTSSDVGGYNYVSWYQQHPGKAPKLMIYDVSNRPSGVSNRFSGSKSGNTASLTISGLQAEDEADYYCSSYTSSSTRVFGGGTKLTVL

SEQ ID NO: 1748 - protein, 109 aa, Artificial Sequence
  Description of Artificial Sequence: Synthetic polypeptide
QSALTQPASVSGSPGQSITISCTGTSSDVGAYNYVSWYQQHPGKAPKLMIYEVSNRPSGVSNRFSGSKSGNTASLTISGLQAEDEADYYCSSYTSSSTVFGGGTKLTVL

SEQ ID NO: 1749 - protein, 108 aa, Artificial Sequence
  Description of Artificial Sequence: Synthetic polypeptide
SSELTQDPAVSVALGQTVRITCQGDSLRSYYASWYQQKPGQAPVLVIYGKNNRPSGIPDRFSGSSSGNTASLTITGAQAEDEADYYCNSRDSSGNHLVFGGGTKLTVL

SEQ ID NO: 1750 - protein, 106 aa, Artificial Sequence
  Description of Artificial Sequence: Synthetic polypeptide
SYELTQPPSVSVSPGQTASITCSGDKLGDKYACWYQQKPGQSPVVVIYQDSKRPSGIPERFSGSNSGNTATLTISGTQAMDEADYYCQAWDSSTGVFGGGTKLTVL

SEQ ID NO: 1751 - protein, 109 aa, Artificial Sequence
  Description of Artificial Sequence: Synthetic polypeptide
EIVLTQSPGTLSLSPGERATLSCRASQSVGSIYLAWYQQKPGQAPRLLIYGASSRATGIPDRFSGSGSGTDFTLTISRLEPEDFAVYYCQQYGSSLTWTFGQGTKVEIK

SEQ ID NO: 1752 - protein, 113 aa, Artificial Sequence
  Description of Artificial Sequence: Synthetic polypeptide
DIVMTQSPDSLAVSLGERATINCKSSQSVLYSSNNKNYLAWYQQKPGQPPKLLIYWASTRESGVPDRFSGSGSGTDFTLTISSLQAEDVAVYYCQQYYSTLWTFGQGTKVEIK

SEQ ID NO: 1753 - protein, 108 aa, Artificial Sequence
  Description of Artificial Sequence: Synthetic polypeptide
SYELTQPPSVSVSPGQTARITCSGDALPKKYAYWYQQKSGQAPVLVIYEDSKRPSGIPERFSGSSSGTMATLTISGAQVEDEADYYCYSTDSSGNHRVFGGGTKLTVL

SEQ ID NO: 1754 - protein, 112 aa, Artificial Sequence
  Description of Artificial Sequence: Synthetic polypeptide
DIVMTQSPLSLPVTPGEPASISCRSSQSLLHSNGYNYLDWYLQKPGQSPQLLIYLGSNRASGVPDRFSGSGSGTDFTLKISRVEAEDVGVYYCMQALQTPYTFGQGTKLEIK

SEQ ID NO: 1755 - protein, 107 aa, Artificial Sequence
  Description of Artificial Sequence: Synthetic polypeptide
SYELTQPPSVSVSPGQTARITCSGDALPKQYAYWYQQKPGQAPVLVIYKDSERPSGIPERFSGSSSGTTVTLTISGVQAEDEADYYCQSADSSGTWVFGGGTKLTVL

SEQ ID NO: 1756 - protein, 113 aa, Artificial Sequence; identical to SEQ ID NO: 1740
  Description of Artificial Sequence: Synthetic polypeptide

SEQ ID NO: 1757 - protein, 108 aa, Artificial Sequence
  Description of Artificial Sequence: Synthetic polypeptide
SSELTQDPAVSVALGQTVRITCQGDSLRSYYASWYQQKPGQAPVLVIYGKNNRPSGIPDRFSGSNSGNTASLTITGAQAEDEADYYCHSRDSSGNHLVFGGGTKLTVL

SEQ ID NO: 1758 - protein, 107 aa, Artificial Sequence
  Description of Artificial Sequence: Synthetic polypeptide
DIQMTQSPSTLSASVGDRVTITCRASQSISSWLAWYQQKPGKAPKLLIYKASSLESGVPSRFSGSGSGTEFTLTISSLQPDDFATYYCQQYNSYPWTFGQGTKVEIK

SEQ ID NO: 1759 - protein, 107 aa, Artificial Sequence
  Description of Artificial Sequence: Synthetic polypeptide
DIQMTQSPSSLSASVRDRVTITCRASQSISSYLNWYQQKPGKAPKLLIYAASSLQSGVPSRFSGSGSGTDFTLTISSLQPEDFATYYCQQSYSTPHTFGQGTKLEIK

SEQ ID NO: 1760 - protein, 109 aa, Artificial Sequence
  Description of Artificial Sequence: Synthetic polypeptide
SYELTQPPSVSVSPGQTARITCSGDALPKQYAYWYQQKPGQAPVLVIYKDSERPSGIPERFSGSSSGTTVTLTISGVQAEDEADYYCQSADSSGTYSWVFGGGTKLTVL

SEQ ID NO: 1761 - protein, 115 aa, Artificial Sequence
  Description of Artificial Sequence: Synthetic polypeptide
QAVLTQPASLSASPGASASLTCTLRSGINVDSYRIYWYHQKPGSPPQYLLNYKSAADKEQGSGVPSRFSGSKDASANAGILIISGLQSEDEADYYCMIWHNSAYFFGTGTKVTVL

SEQ ID NO: 1762 - protein, 106 aa, Artificial Sequence
  Description of Artificial Sequence: Synthetic polypeptide
SYELTQPPSVSVSPGQTASITCSGDKLGDKYACWYQQKPGQSPVLVIYQDSKRPSGIPERFSGSNSGNTATLTISGTQAMDEADYYCQAWDSSTGVFGGGTKLTVL

SEQ ID NO: 1763 - protein, 107 aa, Artificial Sequence
  Description of Artificial Sequence: Synthetic polypeptide
DIQMTQSPSSLSASVGDRVTITCQASQDISNYLNWYQQKPGKAPKLLIYDASNLETGVPSRFSGSGSGTDFTFTISSLQPEDIATYYCQQYDNLPITFGQGTRLEIK

SEQ ID NO: 1764 - protein, 110 aa, Artificial Sequence
  Description of Artificial Sequence: Synthetic polypeptide
QSALTQPASVSGSPGQSITISCTGTSSDVGSYNLVSWYQQHPGKAPKLMIHEGSKRPSGVSNRFSGSKSGNTASLTISGLQAEDEADYYCCSYAGSSTWVFGGGTKLTVL

SEQ ID NO: 1765 - protein, 106 aa, Artificial Sequence; identical to SEQ ID NO: 1653
  Description of Artificial Sequence: Synthetic polypeptide

SEQ ID NO: 1766 - protein, 106 aa, Artificial Sequence; identical to SEQ ID NO: 1653
  Description of Artificial Sequence: Synthetic polypeptide

SEQ ID NO: 1767 - protein, 112 aa, Artificial Sequence
  Description of Artificial Sequence: Synthetic polypeptide
DIVMTQTPLSSPVTLGQPASISCRSSQSLVHSDGNTYLSWLQQRPGQPPRLLIYKISNRFSGVPDRFSGSGAGTDFTLKISRVEAEDVGVYYCTQATQFPWTFGQGTKVEIK

SEQ ID NO: 1768 - protein, 112 aa, Artificial Sequence
  Description of Artificial Sequence: Synthetic polypeptide
DIVMTQSPDSLAVSLGERATINCKSSQSVLYSSNNKNYLAWYQQKPGQPPKLLIYWASTRESGVPDRFSGSGSGTDFTLTISSLQAEDVAVYYCQQYYSTPRFGPGTKVDIK

SEQ ID NO: 1769 - protein, 108 aa, Artificial Sequence
  Description of Artificial Sequence: Synthetic polypeptide
SSKLTQDPAVSVALGQTVTITCQGDSLRNYYASWYQQKPGQAPVLVIYAQNNRPSGIPDRFSGSISGTTASLTITGAQAEDEADYYCNSRDSSGDRLVFGGGTKLTVV

SEQ ID NO: 1770 - protein, 107 aa, Artificial Sequence
  Description of Artificial Sequence: Synthetic polypeptide
SYELTQPPSVSVSPGQTASITCSGDKLGDKYACWYQQKPGQSPVLVIYQDTKRPSGIPERFSGSNSGNTATLTISGTQAMDEADYYCQAWDSSTAWVFGGGTKLTVL

SEQ ID NO: 1771 - protein, 108 aa, Artificial Sequence
  Description of Artificial Sequence: Synthetic polypeptide
EIVLTQSPGTLSLSPGERATLSCRASQSVSSNYLAWYQQKPGQAPRLLIYGASSRATGIPDRFSGSGSGTDFTLTISRLEPEDFAVYYCQQYGSSPLTFGGGTKVEIK

SEQ ID NO: 1772 - protein, 107 aa, Artificial Sequence
  Description of Artificial Sequence: Synthetic polypeptide
DIQMTQSPSTLSASVGDRVTITCRASQSVSSYLNWYQQKPGKAPKLLIYAASSLQSGVPSRFSGSGSGTDFTLTISSLQPEDFATYFCQQSYSTPRTFGQGTKLEIK

SEQ ID NO: 1773 - protein, 107 aa, Artificial Sequence
  Description of Artificial Sequence: Synthetic polypeptide
DIQMTQSPSSLSASVGDRVTITCRASQSISSYLNWYQQKPGKAPKLLIYAASSLQSGVPSRFSGSGSGTDFTLTISSLQPEDFATYYCQQSYSTPRTFGQGTKLEIK

SEQ ID NO: 1774 - protein, 110 aa, Artificial Sequence
  Description of Artificial Sequence: Synthetic polypeptide
QTVVTQEPSFSVSPGGTVTLTCGLSSGSVSTTYYPSWYQQTPGQAPRTLIYNTKTRSSGVPDRFSGSILGNKAALTITGAQADDESDYYCVLYMGSGIWVFGGGTKLTVL

SEQ ID NO: 1775 - protein, 108 aa, Artificial Sequence
  Description of Artificial Sequence: Synthetic polypeptide
EIVLTQSPATLSLSPGERATLSCRASQSVSSYLAWYQQKPGQAPRLLIYDASNRATGIPARFSGSGSGTDFTLTISSLEPEDFAVYYCQQRSNWPPYTFGQGTKLEIK

SEQ ID NO: 1776 - protein, 108 aa, Artificial Sequence; identical to SEQ ID NO: 1661
  Description of Artificial Sequence: Synthetic polypeptide

SEQ ID NO: 1777 - protein, 107 aa, Artificial Sequence
  Description of Artificial Sequence: Synthetic polypeptide
DIQMTQSPSSLSASVGDRVTITCRASQSISSYLNWYQQKPGKAPKLLIYAASSLQSGVPSRFSGSGSGTDFTLTISSLQPEDFATYYCQQSYSTPYTFGQGTKLEIK

SEQ ID NO: 1778 - protein, 106 aa, Artificial Sequence; identical to SEQ ID NO: 1762
  Description of Artificial Sequence: Synthetic polypeptide

SEQ ID NO: 1779 - protein, 112 aa, Artificial Sequence
  Description of Artificial Sequence: Synthetic polypeptide
DIVMTQSPLSLPVTPGEPASISCRSSQSLLHSNGYNYLVWYLQKPGQSPQLLIYFGSNRASGVPDRFSGSGSGTDFTLRISRVEAEDVGVYYCMQSLQTPVTFGGGTKVEIK

SEQ ID NO: 1780 - protein, 107 aa, Artificial Sequence
  Description of Artificial Sequence: Synthetic polypeptide
DIQMTQSPSTLSASVGDRVTITCRASQSISSWLAWYQQKPGKAPKLLIYKASSLESGVPSRFSGSGSGTEFTLTISSLQPDDFATYYCQQYNSYSWTFGQGTKVEIK

SEQ ID NO: 1781 - protein, 110 aa, Artificial Sequence
  Description of Artificial Sequence: Synthetic polypeptide
QSALTQPASVSGSPGQSITISCTGTSSDVGGYNYVSWYQQHPGKAPKLMIYDVSNRPSGVSNRFSGSKSGNTASLTISGLQAEDEADYYCSSYTSSSTVVFGGGTKLTVL

SEQ ID NO: 1782 - protein, 108 aa, Artificial Sequence
  Description of Artificial Sequence: Synthetic polypeptide
ENVLTQSPGTLSLFPGERATLSCGASRSLGSNYLAWYQQKPGQAPRLLIYGAFHRANGIPDRFSGSGSGTDFTLTISRLEPEDFAVYYCQQYNSSPYTFGQGTKLELK

SEQ ID NO: 1783 - protein, 115 aa, Artificial Sequence
  Description of Artificial Sequence: Synthetic polypeptide
LPVVTQAPSASALLGTSIKLTCTLSSEHSTYTIDWYQQRPGRSPRHIMKIKSDGSHIKGGDIPDRFTGSSSGADRYLIISNLQPDDEAEYHCGQSHTNNGQAGVVFGGGTKLTVL

SEQ ID NO: 1784 - protein, 111 aa, Artificial Sequence
  Description of Artificial Sequence: Synthetic polypeptide
QTVVTQEPSLSVSPGGTVTLTCGLSSGSVSAHYFPTWYFQTPGQPPRTLIYRTNTRSSGVPDRFSGSVLGDKAALTITGAQADDEADYYCALSMNSGSFWVFGGGTKLTVL

SEQ ID NO: 1785 - protein, 113 aa, Artificial Sequence
  Description of Artificial Sequence: Synthetic polypeptide
DIVMTQSPDSLAVSLGERATITCKSSQSVLYNSNNKDYLAWYQQKPGQPPKLLIYWASTRTSGVPDRFTGSGSGTDFTLTINSLQAEDVAVYYCQQYYTSPRTFGQGTKVEIK

SEQ ID NO: 1786 - protein, 112 aa, Artificial Sequence
  Description of Artificial Sequence: Synthetic polypeptide
NIVMTQSPLSLPVTPGEPASISCRSSESLVHPNGKTWLDWYLQKPGQSPQVLIHSASIRASGVPDRFSGSGSGTDFTLKISRVEAEDVGVYYCMQGLQTPYTFGQGTKLEIK

SEQ ID NO: 1787 - protein, 108 aa, Artificial Sequence
  Description of Artificial Sequence: Synthetic polypeptide
EIVLTQSPGTLSLSPGERATLSCRASQSVYGSYLAWYQQKPGQAPRLLIYGGSSRATGIPDRFSGSGSGTDFTLTISRLEPEDFAVYYCHQYGTSRYSFGQGTKLDIK

SEQ ID NO: 1788 - protein, 113 aa, Artificial Sequence
  Description of Artificial Sequence: Synthetic polypeptide
ENVLTQSPDTLSVSPGERAALFCRASQSVAGSSFGGSYLAWYQQRPGQPPRLLIYGASTRATGVPDRFSGSGFGTDFTLTINRLEPEDIAVYYCQQYDKSPITFGQGTRLEIK

SEQ ID NO: 1789 - protein, 106 aa, Artificial Sequence
  Description of Artificial Sequence: Synthetic polypeptide
DIQMTQSPSTLSASVGDRVTITCRASQSIRNWLAWYQQKPGKVPKLLISDASNLKSGVPSRFSGSGFGTEFTLTINNLQPDDSASYYCQQYILYWTFGHGTKVEIK

SEQ ID NO: 1790 - protein, 111 aa, Artificial Sequence
  Description of Artificial Sequence: Synthetic polypeptide
QPVLTQSPSASASLGASVKLTCTLSSGYSTYAIAWHQQLPGKGPRYLMKLNSDGSHTKGDLIPDRFSGSSSGAERYLTISSLQSEDEGDYYCQTWGSGIQVFGGGTKLTVL

SEQ ID NO: 1791 - protein, 108 aa, Artificial Sequence
  Description of Artificial Sequence: Synthetic polypeptide
SSELTQDPAVSVALGQTVRITCQGDSLRTYYATWYQQKPGQAPLLVIYAKNSRPSGIPDRFSGSSSGNTASLTITGALAEDEADYYCNSRDSSGNYVVFGGGTKLTVL

SEQ ID NO: 1792 - protein, 111 aa, Artificial Sequence
  Description of Artificial Sequence: Synthetic polypeptide
QTVVTQEPSLTVSPGGTVTLTCASSTGAVTSGYYPIWFQQKPGQAPRALIYNTNYRHSWTPARFSGSLLGGKAALTLSSVQPEDEAEFHCLLYYGGAQPWVFGGGTKLTVL

SEQ ID NO: 1793 - protein, 108 aa, Artificial Sequence
  Description of Artificial Sequence: Synthetic polypeptide
SSELTQDPGVSVALGQTVRITCQGDSLRSYYASWLQQKPGQAPVVVINGKNSRPSGIPDRFSGSTSGNTASLSITGAQAEDEADYYCNSRDSSGNSVVFGGGTKLTVL

SEQ ID NO: 1794 - protein, 106 aa, Artificial Sequence
  Description of Artificial Sequence: Synthetic polypeptide
SYEVTQPPSVSVSPGQTASITCSGDELGRKYVSWYQQRPGQSPVLVIYRDNRRPSGIPERFSGSNFGNTATLTISGPQAMDEADYYCQAWDSTTVIFGGGTKLTVL

SEQ ID NO: 1795 - protein, 107 aa, Artificial Sequence
  Description of Artificial Sequence: Synthetic polypeptide
DIQMTQSPSSLSASVRDRVTITCRASQSISSYLNWYRQKPGKAPELLISAASTLQSGVPSRFSASGSGTDFTLTISSLQPEDFATFYCQQSYSAPFTFGGGTKVEIK

SEQ ID NO: 1796 - protein, 107 aa, Artificial Sequence
  Description of Artificial Sequence: Synthetic polypeptide
DIQMTQSPSSLSASVGDRVTITCQASQDISNYLNWYQQTPGKAPRLLIYDASNLETGVPSRFSGSGFGTDFTFTISSLQPEDIATYYCQQADNLPYTFGQGTKLEIK

SEQ ID NO: 1797 - protein, 112 aa, Artificial Sequence
  Description of Artificial Sequence: Synthetic polypeptide
DIVMTQSPLSLPVTPGEPASISCRSSQSLLHNDGYNYLDWYLQRPGQTPQLLIYLGFHRASGVPDRFSGSGSGTDFTLKISRVEAEDFGVYYCVQALQTPLTFGGGTKVEIK

SEQ ID NO: 1798 - protein, 112 aa, Artificial Sequence
  Description of Artificial Sequence: Synthetic polypeptide
QSVLTQPPSVSGAPGQRVTISCTGSSSNIGAGYDVHWYQQLPGTAPKLIIYANNNRPSGVPDRFSASKSGTSASLAITGLQPEDEADYYCQSYDNSLSGSRVFGGGTKLTVL

SEQ ID NO: 1799 - protein, 109 aa, Artificial Sequence
  Description of Artificial Sequence: Synthetic polypeptide
EVVLTQSPATLSLSPGERATLSCRASQSVSSFLGWYQQKPGQAPRLLIYDASNRASGIPARFSGSGSGTDFTLTISKLEPEDFAVYYCQQRSRGPSGITFGQGTRLEIK

SEQ ID NO: 1800 - protein, 107 aa, Artificial Sequence
  Description of Artificial Sequence: Synthetic polypeptide
AIHLTQSPSSLSASVRDRVTITCRASQDISSALAWYHQKPGKPPKLLIYDASSLENGVPSRFSGSGSGTDFTLTISSLQPEDFATYYCQQFNTYPLTFGGGTKVEIK

SEQ ID NO: 1801 - protein, 113 aa, Artificial Sequence
  Description of Artificial Sequence: Synthetic polypeptide
DIVLTQTPLSLSVTPGQPASISCKSSQTLLHSDGKTYLYWYLQKPGQPPQLLIYEVSNRFSGVPDRFSGSGSGTDFTLTISRVEAEDVGVYYCMQSIELPPLTFGGGTKVEIK

SEQ ID NO: 1802 - protein, 108 aa, Artificial Sequence
  Description of Artificial Sequence: Synthetic polypeptide
DIQMTQSPSSLSASVGDRVTISCQASQDISNFLNWYQQKPGEAPKLLIYDASILEAGVPSRFSGSGSGTDFTFSISSLQPEDIGTYYCQQYDNLAPLTFGGGTKVEIK

SEQ ID NO: 1803 - protein, 108 aa, Artificial Sequence
  Description of Artificial Sequence: Synthetic polypeptide
SYELTQPPSVSVSPGQTGRITCSGDELPKQYASWYQQKPGQAPVLVMYKDTERPSGIPERFSGSSSGTTVTLTISGVQAEDEADYYCQSPDSSDTYRVFGGGTKLTVL

SEQ ID NO: 1804 - protein, 109 aa, Artificial Sequence
  Description of Artificial Sequence: Synthetic polypeptide
EIVMTQSPATLSVSPGERATFSCRASQSVGNNVAWYQQKPGQSPRLLIYGASLRATGIPARFSGSGSGTEFTLTISSLQSEDFAVYYCQQYNNWPPSITFGQGTRLEIK

SEQ ID NO: 1805 - protein, 110 aa, Artificial Sequence
  Description of Artificial Sequence: Synthetic polypeptide
SYDLTQPPSVSVSPGQTARITCSGDALPNQYVYWYQQKPGQAPLMVIFKDKERPSGIPERFSGSSSGTIVTLTISGVQAEDEADYYCQSADSSGTYPNWVFGAGTKLIVL

SEQ ID NO: 1806 - protein, 111 aa, Artificial Sequence
  Description of Artificial Sequence: Synthetic polypeptide
QSALTQPASVSGSPGQSITISCTGTSSDVGGYNYVSWYQQHPGKAPKLMIYEVTNRPSGVSYRFSGSRSGNTASLTISGLQAEDEADYYCSSYTSVSTLMLFGGGTKLTVL

SEQ ID NO: 1807 - protein, 112 aa, Artificial Sequence
  Description of Artificial Sequence: Synthetic polypeptide
DIVMTQTPLSLSVTPGQPASISCKSSQSLLHSAGKTYLYWYLQKPGQSPQLLIYEVSNRFSGVPDRFSGSGSGTDFTLKISRVEAEDVGVYYCMQTIQLPISFGQGTRLGIK

SEQ ID NO: 1808 - protein, 110 aa, Artificial Sequence
  Description of Artificial Sequence: Synthetic polypeptide
QSVLTQPPSASGTPGQRVTISCSGSTSNIGSNYVFWYQQFPGTAPKLLIYRNDQRPSGVPDRFSASKAGTSASLAISGLRSEDEADYYCTSWDDSLNGPLFGGGTKLTVL

SEQ ID NO: 1809 - protein, 107 aa, Artificial Sequence
  Description of Artificial Sequence: Synthetic polypeptide
DIQMTQSPSSLSASVGDKVTITCRASQSISTFVNWYQQKPGKAPKFLIYDASSLQSGVPSRFSGSGSGTDFALTISSLQPEDFATYYCQQSFSTLLTFGGGTKVDIK

SEQ ID NO: 1810 - protein, 109 aa, Artificial Sequence
  Description of Artificial Sequence: Synthetic polypeptide
EIVLTQSPGTLSLSPGEGATLSCRASQSVSSGYLAWYQHKPGQAPRLLIYGASSRATGIPDRFRGSGSGTDFTLTITRLEPEDFAVYYCQQYGSSLTWTFGQGTKVEIK

SEQ ID NO: 1811 - protein, 110 aa, Artificial Sequence
  Description of Artificial Sequence: Synthetic polypeptide
EIVLTQSPGTLSLSPGERATLSCRASQTISSRYLAWYYQKPGQAPRLLIQGSSIRATGIPDRFSGSGSGTDFTLTISRLEPEDFAVYYCQHYGSSPPMYTFGQGTKLEIK

SEQ ID NO: 1812 - protein, 112 aa, Artificial Sequence
  Description of Artificial Sequence: Synthetic polypeptide
NFMLTQPHSVSESPGKTVTVSCTRSSGSIASNYVQWYQQRPGSAPTTVIYEDNQRPSGVPDRFSGSIDSSSNSASLTISGLKTEDEAYYYCQSYDSRNPQWVFGGGTTLTVL

SEQ ID NO: 1813 - protein, 112 aa, Artificial Sequence
  Description of Artificial Sequence: Synthetic polypeptide
DVVMTQSPLSLPVTLGQPASISCRSSESLVHTDGNTYLNWFHQRPGHSPRRLIYKVSNRDSGVPDRFGGSGSGTDFTLKISWVEAEDVGVYYCMQGTHWPWTFGQGTKVEIK

SEQ ID NO: 1814 - protein, 107 aa, Artificial Sequence
  Description of Artificial Sequence: Synthetic polypeptide
EVVMTQSPATLSVSPGERATLSCRASQTFSSNLAWYQQKPGQPPRLLIYGASTRATGVPARFSGSGSGTEFTLTISSLQSEDFAVYYCQQYNDWPRTFGQGTKVEMK

SEQ ID NO: 1815 - protein, 108 aa, Artificial Sequence
  Description of Artificial Sequence: Synthetic polypeptide
EIVLTQSPGTLSLSPGERATLSCRASQSISSTYLAWYQQKPGQAPRLLIYGASSRATGIPDRFSGTGSGTDFTLTISRLEPEDFAVYYCQQYGVSPNTFGGGTKVEIK

SEQ ID NO: 1816 - protein, 108 aa, Artificial Sequence
  Description of Artificial Sequence: Synthetic polypeptide
SYVLTQPPSVSVAPGKTARITCGGNNIGRKSVHWYQQKPGQTPVLVVYDDTDRPSRIPERFSGSNSGNTATLTISRVEAGDEADYYCQVWDSSSDHVVFGGGTRLTVP

SEQ ID NO: 1817 - protein, 112 aa, Artificial Sequence
  Description of Artificial Sequence: Synthetic polypeptide
QLVLTQSPSASASLGASVRLTCTLSSGHSSYPIAWHQQQPDKGPRYLLKLNSDGSHSKGDGIPDRFSASSSGTERYLTISSLQSEDEADYYCQTWGTATPWVFGGGTKLTVL

SEQ ID NO: 1818 - protein, 107 aa, Artificial Sequence
  Description of Artificial Sequence: Synthetic polypeptide
DIQMTQSPSSLSASVGDRVTITCRTSQSIATYLNWYHQKPGKPPNLLIFAASSLHSGVPSRFSGSGSGTDFTLTISSLQPEDFATYYCQQTYSAPYTFGQGTKLAIK

SEQ ID NO: 1819 - protein, 109 aa, Artificial Sequence
  Description of Artificial Sequence: Synthetic polypeptide
DIQMTQSPSSVSASLGDRVTITCRASQGISNLLAWYQQKPGKAPKLLIYAASRLQSGVPSRFSGSGSGTDFTLTISSLQPEDFATYYCQQANTFPPALTFGGGTKVEIK

SEQ ID NO: 1820 - protein, 109 aa, Artificial Sequence
  Description of Artificial Sequence: Synthetic polypeptide
QAVVTQEPSLTVSPGGTVTLTCGSSTGPVTSGRYPYWLQQKPGQAPRTLIYDTNTKYSWTPARFSGSLLGGKAALTLSGAQPEDEADYYCLLSYSGARVFGGGTKLTVL

SEQ ID NO: 1821 - protein, 111 aa, Artificial Sequence
  Description of Artificial Sequence: Synthetic polypeptide
QSALTQPRSVSGSPGQPVTISCTGSSSDVGGYNYVSWYQQHPGKAPKLIIYDVGKRPSRVPDRFSGSKSGNTASLTISGLQAEDEADYYCCSYAGTHTYILFGGGTKVTVL

SEQ ID NO: 1822 - protein, 112 aa, Artificial Sequence
  Description of Artificial Sequence: Synthetic polypeptide
DVVMTQSPLSLPVTLGQPASISCRSSQSLVYSDGNTYLNWFHQRPGQSPRRLIYRVSNWDSGVPDRFSGSGSGTDFTLKISRVEAEDVGVYYCMQGTHWPYTFGQGTKLEIK

SEQ ID NO: 1823 - protein, 111 aa, Artificial Sequence
  Description of Artificial Sequence: Synthetic polypeptide
QSVLTQPPSVSGAPGQRVTISCTGSSSNIGAGYDVHWYQQLPGTAPKLLIYDNTNRPSGVPDRFSGSKSGTSASLAITGLQAEDEADYYCQSYDNSLSGSLFGGGTKLTVL

SEQ ID NO: 1824 - protein, 112 aa, Artificial Sequence
  Description of Artificial Sequence: Synthetic polypeptide
DIVMTQSPDSLAVSLGERATINCKSSQSVLYSSNNKNYLTWYQQKPGQPPKLLIYWASTRESGVPDRFSGSGSGTDFTLTISSLQAEDVAVYHCQQYYSSVTFGQGTRLEIK

SEQ ID NO: 1825 - protein, 107 aa, Artificial Sequence
  Description of Artificial Sequence: Synthetic polypeptide
DIQMTQSPSSLSASVGDRVTITCRASQGISNYLAWYQQKPGKVPKLLIYAASTLQSGVPSRFSGSGSGTDFTLTISSLQPEDVATYYCQKYNSAPFTFGPGTKVDIK

SEQ ID NO: 1826 - protein, 108 aa, Artificial Sequence
  Description of Artificial Sequence: Synthetic polypeptide
SYELTQPPSVSVSPGQTARITCSGDALPKKYASWYQQKSGQAPVLVIYEDTKRPSGIPERFSGSSSGTMATLTISGAQVEDEADYYCYSTDSSGNHRVFGGGTKLTVL

SEQ ID NO: 1827 - protein, 107 aa, Artificial Sequence
  Description of Artificial Sequence: Synthetic polypeptide
AIQLTQSPSSLSASVGDRVTITCRASQGISSYLAWYQQKPGKAPKLLIYAASTLQSGVPSRFSGSGSGTDFTLTISSLQPEDFATYYCQQLNSYPRTFGQGTKLEIK

SEQ ID NO: 1828 - protein, 108 aa, Artificial Sequence; identical to SEQ ID NO: 1661
  Description of Artificial Sequence: Synthetic polypeptide

SEQ ID NO: 1829 - protein, 108 aa, Artificial Sequence
  Description of Artificial Sequence: Synthetic polypeptide
SSELTQDPAVSVALGQTVRITCQGDSLRSYYASWYQQKPGQAPVLVIYGKNNRPSGIPDRFSGASSGNTASLTITGAQAEDEADYYCNSRDSSGNHLVFGGGTKLTVL

SEQ ID NO: 1830 - protein, 107 aa, Artificial Sequence
  Description of Artificial Sequence: Synthetic polypeptide
DIQMTQSPSSLSASVGDRVTITCRASQSISSYLNWYQQKPGKAPKLLIYAASSLQSGVPSRFSGSGSGADFTLTISSLQPEDFATYYCQQSYSTPLTFGGGTKVEIK

SEQ ID NO: 1831 - protein, 108 aa, Artificial Sequence
  Description of Artificial Sequence: Synthetic polypeptide
SSELTQDPAVSVALGQTVRITCQGDSLRSYYASWYQQKPGQAPLLVIYGKNNRPSGIPDRFSASSSGNTASLTITGAQAEHEADYYCNSRDSSGNHWVFGGGTKLTVL

SEQ ID NO: 1832 - protein, 108 aa, Artificial Sequence; identical to SEQ ID NO: 1661
  Description of Artificial Sequence: Synthetic polypeptide

SEQ ID NO: 1833 - protein, 108 aa, Artificial Sequence
  Description of Artificial Sequence: Synthetic polypeptide
SYELTQPPSVSVSPGQTARITCSGDALPKQYAYWYQQKPGQAPILMIYKDTERPSGIPERFSGSSSGTTVTLTISGVQAEDEADYYCQSADSSGSSVVFGGGTKLTVL

SEQ ID NO: 1834 - protein, 106 aa, Artificial Sequence
  Description of Artificial Sequence: Synthetic polypeptide
EIVLTQSPATLSLSPGERATLSCRASQSVSSYLAWYQQKPGQAPRLLIYDASNRATGIPARFSGSGSGTDFTLTISSLEPEDFAVYYCQQRSKGITFGQGTRLEIK

SEQ ID NO: 1835 - protein, 110 aa, Artificial Sequence
  Description of Artificial Sequence: Synthetic polypeptide
SYVLTQPPSVSVAPGKTARITCGGNNIGSKSVHWYQQKPGQAPVLVVYDDSDRPSGIPERFSGSNSGNTATLTISRVEAGDEADYYCQVWDSSTDHPGVVFGGGTKLTVL

SEQ ID NO: 1836 - protein, 108 aa, Artificial Sequence
  Description of Artificial Sequence: Synthetic polypeptide
EIVMTQSPATLSVSPGERATLSCRASQSVSSKLAWYQQKPGQAPRLLIYGASTRATGIPARFSGSGSGTEFTLTISSLQSEDFAVYYCQQYNNWPPYTVGQGTKLEIK

SEQ ID NO: 1837 - protein, 107 aa, Artificial Sequence
  Description of Artificial Sequence: Synthetic polypeptide
DIQMTQSPSTLSASVGDRVTITCRASQSISSWLAWYQQKPGKAPKLLIYDASSLESGVPSRFSGSGSGTEFTLTISSLQPDDFATYYCQQYNSYSRTFGQGTKVEIK

SEQ ID NO: 1838 - protein, 107 aa, Artificial Sequence
  Description of Artificial Sequence: Synthetic polypeptide
DIQMTQSPSTLSASVGDRVTITCRASQSISSWLAWYQQKPGKAPKLLIYDASSLESGVPSRFSGSGSGTEFTLTISSLQPDDFATYYCQQYNSYSGTFGQGTKVEIK

SEQ ID NO: 1839 - protein, 107 aa, Artificial Sequence
  Description of Artificial Sequence: Synthetic polypeptide
DIQMTQSPSSLSASVGDRVTITCRASQSISSYLNWYQQKPGKAPKLLIYAASSLQSGVPSRFSGSGSGTDFTLTISSLQPEDFATYYCQQSYSHPLTFGGGTKVEIK

SEQ ID NO: 1840 - protein, 108 aa, Artificial Sequence
  Description of Artificial Sequence: Synthetic polypeptide
DIQMTQSPSTLSASVGDRVTITCRASQSINNWLAWYQQKPGKAPQLLIYKASSLESGVPSRFSGSGSGTKFTLTISSLQPDDFATYYCQQYNSYSQYTFGQGTKLEIK

SEQ ID NO: 1841 - protein, 110 aa, Artificial Sequence
  Description of Artificial Sequence: Synthetic polypeptide
QSALTQPPSASGSPGQSVTISCTGTSSDVGGYNYVSWYQQHPGKAPKLMIFDVSKRPSGVPDRFSGSKSGNTASLTVSGLQAEDEADYYCSSYAGSNNWVFGGGTKLTVL

SEQ ID NO: 1842 - protein, 108 aa, Artificial Sequence
  Description of Artificial Sequence: Synthetic polypeptide
EIVMTQSPATLSVSPGERATLSCRASQSVSSNLAWYQQKPGQAPRLLIYGASTRATGFPARFSGSGSGTEFTLTISGLQSEDFAVYYCQQYNNWPPWTFGQGTKVEIK

SEQ ID NO: 1843 - protein, 107 aa, Artificial Sequence
  Description of Artificial Sequence: Synthetic polypeptide
DIQLTQSPSFLSASVGDRVTITCRASQGISSYLAWYQQKPGKAPKLLIYAASTLQSGVPSRFSGSGSGTEFTLTISSLQPEDFATYYCQQLNSYPITFGQGTRLEIK

SEQ ID NO: 1844 - protein, 111 aa, Artificial Sequence
  Description of Artificial Sequence: Synthetic polypeptide
QSALTQPASVSGSPGQSITISCTGTSSDVGGYNYVSWYQQHPGKAPKLMIYDVSNRPSGVSNRFSGSKSGNTASLTISGLQAEDEADYYCSSYTSSSTLVVFGGGTKLTVL

SEQ ID NO: 1845 - protein, 111 aa, Artificial Sequence
  Description of Artificial Sequence: Synthetic polypeptide
QSVLTQPPSVSGAPGQRVTISCTGSSSNIGAGYDVHWYQHLPGTAPKLLIYGNSNRPSGVPDRFSGSKSGTSASLAITGLQAEDEADYYCQSYDSSLSDVVFGGGTKLTVL

SEQ ID NO: 1846 - protein, 109 aa, Artificial Sequence
  Description of Artificial Sequence: Synthetic polypeptide
SYELTQPPSVSVSPGQTARITCSGDALPKQYAYWYQQKPGQAPVLVIYKDSERPSGIPERFSGSSSGTTVTLTISGVQAEDEADYYCQSADSSGTYPVVFGGGTKLTVL

SEQ ID NO: 1847 - protein, 108 aa, Artificial Sequence
  Description of Artificial Sequence: Synthetic polypeptide
DIQMTQSPSSLSASVGDRVTITCRASQSISSYLNWYQQKPGKAPKLLIYAASSLQSGVPSRFSGSGSGTDFTLTISSLQPEDFATYYCQQSYSTPLITFGQGTRLEIK

SEQ ID NO: 1848 - protein, 107 aa, Artificial Sequence
  Description of Artificial Sequence: Synthetic polypeptide
DIQMTQSPSTLSASVGDRVTITCRASQSISRWLAWYQQKPGKAPKLLIYKASSLESGVPSRFSGSGSGTEFTLTISSLQPDDFATYYCQQYNSYQGTFGQGTKVEIK

SEQ ID NO: 1849 - protein, 111 aa, Artificial Sequence
  Description of Artificial Sequence: Synthetic polypeptide
QSVLTQPPSVSGAPGQRVTISCTGSSSNIGAGYDVHWYQQLPGTAPKLLIYGNSNRPSGVPDRFSGSKSGTSASLAITGLQAEDEADYYCQSYDSSLSGYVFGTGTKVTVL

SEQ ID NO: 1850 - protein, 107 aa, Artificial Sequence [sequence omitted]

SEQ ID NO: 1851 - protein, 113 aa, Artificial Sequence
  Description of Artificial Sequence: Synthetic polypeptide
DIVMTQSPDSLAVSLGERATINCKSSQSVLYSSNNKNYLAWYQQKPGQPPKLLIYWASTRESGVPDRFSGSGSGTDFTLTISSLQAEDVAVYYCQQYYSTPLTFGQGTKLEIK

SEQ ID NO: 1852 - protein, 108 aa, Artificial Sequence
  Description of Artificial Sequence: Synthetic polypeptide
EIVLTQSPGTLSLSPGERATLSCRASQSVSSSYLAWYQQKPGQAPRLLIYGASSRATGIPDRFSGSGSGTDFTLTISRLEPEDFAVYYCQQYGSSPRTFGQGTKVEIK

SEQ ID NO: 1853 - protein, 107 aa, Artificial Sequence
  Description of Artificial Sequence: Synthetic polypeptide
SYELTQPPSVSVSPGQTASITCSGDKLGDKYACWYQQKPGQSPVLVIYQDSKRPSGIPERFSGSNSGNTATLTISGTQAMDEADYYCQAWDSSTAWVFGGGTKLTVL

SEQ ID NO: 1854 - protein, 108 aa, Artificial Sequence
  Description of Artificial Sequence: Synthetic polypeptide
SSELTQDPAVSVALGQTVRITCQGDSLRSYYASWYQQKPGQAPVLVIYGKNNRPSGIPDRFSGSSSGNTASLTITGAQAEDEADYYCNSRDSSGNRWVFGGGTKLTVL

SEQ ID NO: 1855 - protein, 109 aa, Artificial Sequence
  Description of Artificial Sequence: Synthetic polypeptide
DIQMTQSPSTLSASVGDRVTITCRASQSISSWLAWYQQKPGKAPKLLIYKASSLESGVPSRFSGSGSGTEFTLTISSLQPDDFATYYCQQYNSYSRAWTFGQGTKVEIK

SEQ ID NO: 1856 - protein, 107 aa, Artificial Sequence
  Description of Artificial Sequence: Synthetic polypeptide
DIQMTQSPSSLSASVGDRVTITCRASQGIKYYLAWFQQKPGKAPKSLIYAASSLLSGVPSKFSGSGSGTDFTLTISSLQPEDFATYYCQQYNSYPYTFGQGTKLEIK

SEQ ID NO: 1857 - protein, 107 aa, Artificial Sequence
  Description of Artificial Sequence: Synthetic polypeptide
DIQMTQSPSSLSASVGDRVTITCRASQSISSYLNWYQQKPGKAPKLLIYAASSLQSGVPSRFSGSGSGTDFTLTISSLQPEDFATFYCQQSYSFPYTFGQGTKLEIK

SEQ ID NO: 1858 - protein, 107 aa, Artificial Sequence
  Description of Artificial Sequence: Synthetic polypeptide
DIQMTQSPSTLSASVGDRVTITCRASQSISSWLAWYQQKPGKAPKLLIYDASSLESGVPSRFSGSGSGTEFTLTISSLQPDDFATYYCQQYNSYTWTFGQGTKVEIK

SEQ ID NO: 1859 - protein, 108 aa, Artificial Sequence
  Description of Artificial Sequence: Synthetic polypeptide
SYELTQPPSVSVSPGQTARITCSGDALPKKYAYWYQQKSGQAPVLVIYEDSKRPSGIPERFSGSSSGTMATLTISGAQVEDEADYYCYSTDSSGNHYVFGTGTKVTVL

SEQ ID NO: 1860 - protein, 108 aa, Artificial Sequence
  Description of Artificial Sequence: Synthetic polypeptide
EIVLTQSPGTLSLSPGERATLSCRASQSVSSSYLAWYQQKPGQAPRLLIYGASSRATGIPDRFSGSGSGTDFTLTISRLEPEDFAVYYCQQYGSSPYTFGQGTKLEIK

SEQ ID NO: 1861 - protein, 110 aa, Artificial Sequence
  Description of Artificial Sequence: Synthetic polypeptide
QSALTQPASVSGSPGQSITISCTGTSSDVGGYNYVSWYQQHPGKAPQLMIYDVINRPSGVSNRFSGSKSGNTASLTISGLQAEDEADYYCSSYTSSSTVVFGGGTKLTVL

SEQ ID NO: 1862 - protein, 108 aa, Artificial Sequence; identical to SEQ ID NO: 1661
  Description of Artificial Sequence: Synthetic polypeptide

SEQ ID NO: 1863 - protein, 108 aa, Artificial Sequence
  Description of Artificial Sequence: Synthetic polypeptide
SSELTQDPAVSVALGQTVRITCQGDSLRSYYASWYQQKPGQAPVVVIYGKNNRPSGIPDRFSGSSSGNTASLTITGAQAEDEADYYCNSRDSSGNHRVFGGGTKLTVL

SEQ ID NO: 1864 - protein, 108 aa, Artificial Sequence
  Description of Artificial Sequence: Synthetic polypeptide
QSALTQPASVSGSPGQSITISCTGTSSDVGSYNLVSWYQQHPGKAPKLMIYEGSKRPSGVSNRFSGSKSGNTASLTISGLQAEDEADYYCCSYAGSAVFGGGTKLTVL

SEQ ID NO: 1865 - protein, 109 aa, Artificial Sequence
  Description of Artificial Sequence: Synthetic polypeptide
EIVLTQSPGTLSLSPGERATLSCRASQSVSSSYLAWYQQKPGQAPRLLIYGASSRATGIPDRFSGSGSGTDFTLTISRLEPEDFAVYYCQQYGSSPAYTFGQGTKLEIK

SEQ ID NO: 1866 - protein, 106 aa, Artificial Sequence
  Description of Artificial Sequence: Synthetic polypeptide
SYELTQPPSVSVSPGQTASITCSGDKLGDKYACWYQQKPGQSPVLVIYQDSKRPSGIPERFSGSNSGNTATLTISGTQAMDEADYYCQAWDSSSVVFGGGTKLTVL

SEQ ID NO: 1867 - protein, 106 aa, Artificial Sequence
  Description of Artificial Sequence: Synthetic polypeptide
SYELTQPPSVSVSPGQTASITCSGDKLGDKYACWYQQKPGQSPVLVIYQDSKRPSGIPERFSGSNSGNTATLTISGTQAMDEADYYCQAWDSSTLVFGGGTKLTVL

SEQ ID NO: 1868 - protein, 106 aa, Artificial Sequence
  Description of Artificial Sequence: Synthetic polypeptide
SYELTQPPSVSVSPGQTASITCSGDKLGDKYACWYQQKPGQSPVLVIYQDSKRPSGIPERFSGSNSGNTATLTISGTQAMDEADYYCQAWDSSIVVFGGGTKLTVL

SEQ ID NO: 1869 - protein, 106 aa, Artificial Sequence
  Description of Artificial Sequence: Synthetic polypeptide
DIQMTQSPSTLSASVGDRVTITCRASQSISSWLAWYQQKPGKAPKLLIYKASSLESGVPSRFSGSGSGTEFTLTISSLQPDDFATYYCQQYNSYATFGQGTKLEIK

SEQ ID NO: 1870 - protein, 108 aa, Artificial Sequence; identical to SEQ ID NO: 1647
  Description of Artificial Sequence: Synthetic polypeptide

SEQ ID NO: 1871 - protein, 112 aa, Artificial Sequence
  Description of Artificial Sequence: Synthetic polypeptide
QSVLTQPPSVSEAPGQRVTISCTGSSSNIGAGYDVHWYQQLPGTAPKLLIYGNSNRPSGVPDRFSGSKSGTSASLAITGLQAEDEADYYCQSYDSSLSARYVFGTGTKVTVL

SEQ ID NO: 1872 - protein, 106 aa, Artificial Sequence
  Description of Artificial Sequence: Synthetic polypeptide
SYELTQPPSVSVSPGQTASITCSGDKLGDKYACWYQQKPGQSPVLVIYQDSKRPSGIPERFSGSNSGNTATLTISGTQAMDEADYYCQAWDSSTAVFGGGTKLTVL

SEQ ID NO: 1873 - protein, 107 aa, Artificial Sequence
  Description of Artificial Sequence: Synthetic polypeptide
SSELTQDPAVSVALGQTVRITCQGDSLRSYYASWYQQKPGQAPVLVIYGKNNRPSGIPDRFSGSSSGNTASLTITGAQAEDEADYYCNSRDSSGNHLFGGGTKLTVL

SEQ ID NO: 1874 - protein, 107 aa, Artificial Sequence
  Description of Artificial Sequence: Synthetic polypeptide
EIVLTQSPGTLSLSPGERATLSCRASQSVSSSYLAWYQQKPGQAPRLLIYGASSRATGIPDRFSGSGSGTDFTLTISRLEPEDFAVYYCQQYGSSQTFGQGTKVEIK

SEQ ID NO: 1875 - protein, 108 aa, Artificial Sequence
  Description of Artificial Sequence: Synthetic polypeptide
QSALTQPASVSGSPGQSITISCTGTSSDVGSYNLVSWYQQHPGKAPKLMIYEGSKRPSGVSNRFSGSKSGNTASLTISGLQAEDEADYYCCSYAGSVVFGGGTKLTVL

SEQ ID NO: 1876 - protein, 107 aa, Artificial Sequence; identical to SEQ ID NO: 1853
  Description of Artificial Sequence: Synthetic polypeptide

SEQ ID NO: 1877 - protein, 110 aa, Artificial Sequence
  Description of Artificial Sequence: Synthetic polypeptide
QSALTQPPSASGSPGQSVTISCTGTSSDVGGYNYVSWYQQHPGKAPKLMIYEVSKRPSGVPDRFSGSKSGNTASLTVSGLQAEDEADYYCSSYAGSNNVVFGGGTKLTVL

SEQ ID NO: 1878 - protein, 107 aa, Artificial Sequence
  Description of Artificial Sequence: Synthetic polypeptide
SYELTQPPSVSVSPGQTASITCSGDKLGDKYACWYQQKPGQSPVLVIYQDSKRPSGIPERFSGSNSGNTATLTISGTQAMDEADYYCQAWDSSIHVVFGGGTKLTVL

SEQ ID NO: 1879 - protein, 111 aa, Artificial Sequence
  Description of Artificial Sequence: Synthetic polypeptide
QSVLTQPPSVSGAPGQRVTISCTGSSSNIGAGYDVHWYQQLPGTAPKLLIYGNSNRPSGVPDRFSGSKSGTSASLAITGLQAEDEADYYCQSYDSSLSDVVFGGGTKLTVL

SEQ ID NO: 1880 - protein, 107 aa, Artificial Sequence; identical to SEQ ID NO: 1717
  Description of Artificial Sequence: Synthetic polypeptide

SEQ ID NO: 1881 - protein, 10 aa, Artificial Sequence
  Description of Artificial Sequence: Synthetic peptide
GFTFSSYGMH

SEQ ID NO: 1882 - protein, 10 aa, Artificial Sequence
  Description of Artificial Sequence: Synthetic peptide
GGTFSSYAIS

SEQ ID NO: 1883 - protein, 10 aa, Artificial Sequence
  Description of Artificial Sequence: Synthetic peptide
GGTFSSYAIS

SEQ ID NO: 1884 - protein, 10 aa, Artificial Sequence
  Description of Artificial Sequence: Synthetic peptide
GGTFSSYAIS

SEQ ID NO: 1885 - protein, 10 aa, Artificial Sequence
  Description of Artificial Sequence: Synthetic peptide
GGTFSSYAIS

SEQ ID NO: 1886 - protein, 10 aa, Artificial Sequence
  Description of Artificial Sequence: Synthetic peptide
GGTFSSYAIS

SEQ ID NO: 1887 - protein, 12 aa, Artificial Sequence
  Description of Artificial Sequence: Synthetic peptide
GFSLSTSGVGVG

SEQ ID NO: 1888 - protein, 12 aa, Artificial Sequence
  Description of Artificial Sequence: Synthetic peptide
GFSPSTSGVGVG

SEQ ID NO: 1889 - protein, 17 aa, Artificial Sequence
  Description of Artificial Sequence: Synthetic peptide
VISYDGSNKYYADSVKG

SEQ ID NO: 1890 - protein, 17 aa, Artificial Sequence
  Description of Artificial Sequence: Synthetic peptide
GIIPIFGTANYAQKFQG

SEQ ID NO: 1891 - protein, 17 aa, Artificial Sequence
  Description of Artificial Sequence: Synthetic peptide
GIIPIFGTANYAQKFQG

SEQ ID NO: 1892 - protein, 17 aa, Artificial Sequence
  Description of Artificial Sequence: Synthetic peptide
GIIPIFGTANYAQKFQG

SEQ ID NO: 1893 - protein, 17 aa, Artificial Sequence
  Description of Artificial Sequence: Synthetic peptide
GIIPIFGTANYAQKFQG

SEQ ID NO: 1894 - protein, 17 aa, Artificial Sequence
  Description of Artificial Sequence: Synthetic peptide
GIIPIFGTANYAQKFQG

SEQ ID NO: 1895 - protein, 16 aa, Artificial Sequence
  Description of Artificial Sequence: Synthetic peptide
LIYWDDDKRYSPSLKS

SEQ ID NO: 1896 - protein, 16 aa, Artificial Sequence
  Description of Artificial Sequence: Synthetic peptide
LIYWDDDKRYSPSLKS

SEQ ID NO: 1897 - protein, 12 aa, Artificial Sequence
  Description of Artificial Sequence: Synthetic peptide
AKDYGDYGAFDI

SEQ ID NO: 1898 - protein, 11 aa, Artificial Sequence
  Description of Artificial Sequence: Synthetic peptide
ASVGGDYDLDY

SEQ ID NO: 1899 - protein, 11 aa, Artificial Sequence
  Description of Artificial Sequence: Synthetic peptide
ASVGGDYDLDY

SEQ ID NO: 1900 - protein, 11 aa, Artificial Sequence
  Description of Artificial Sequence: Synthetic peptide
ASVGGDYDLDY

SEQ ID NO: 1901 - protein, 11 aa, Artificial Sequence
  Description of Artificial Sequence: Synthetic peptide
ASVGGDYDLDY

SEQ ID NO: 1902 - protein, 11 aa, Artificial Sequence
  Description of Artificial Sequence: Synthetic peptide
ASVGGDYDLDY

SEQ ID NO: 1903 - protein, 11 aa, Artificial Sequence
  Description of Artificial Sequence: Synthetic peptide
AHLTTLTIFDY

SEQ ID NO: 1904 - protein, 11 aa, Artificial Sequence
  Description of Artificial Sequence: Synthetic peptide
AHHSVATIWDY

SEQ ID NO: 1905 - protein, 17 aa, Artificial Sequence
  Description of Artificial Sequence: Synthetic peptide
KSSQSVLYSSNNKNYLA

SEQ ID NO: 1906 - protein, 11 aa, Artificial Sequence
  Description of Artificial Sequence: Synthetic peptide
RASQSVSSYLA

SEQ ID NO: 1907 - protein, 11 aa, Artificial Sequence
  Description of Artificial Sequence: Synthetic peptide
RASQSVSSYLA

SEQ ID NO: 1908 - protein, 11 aa, Artificial Sequence
  Description of Artificial Sequence: Synthetic peptide
RASQSVSSYLA

SEQ ID NO: 1909 - protein, 11 aa, Artificial Sequence
  Description of Artificial Sequence: Synthetic peptide
RASQSVSSYLA

SEQ ID NO: 1910 - protein, 11 aa, Artificial Sequence
  Description of Artificial Sequence: Synthetic peptide
RASQSVSSYLA

SEQ ID NO: 1911 - protein, 14 aa, Artificial Sequence
  Description of Artificial Sequence: Synthetic peptide
TGASSDVGAYNYVS

SEQ ID NO: 1912 - protein, 14 aa, Artificial Sequence
  Description of Artificial Sequence: Synthetic peptide
TGTRSDVGGYNYVS

SEQ ID NO: 1913 - protein, 7 aa, Artificial Sequence
  Description of Artificial Sequence: Synthetic peptide
WASTRES

SEQ ID NO: 1914 - protein, 7 aa, Artificial Sequence
  Description of Artificial Sequence: Synthetic peptide
DASNRAT

SEQ ID NO: 1915 - protein, 7 aa, Artificial Sequence
  Description of Artificial Sequence: Synthetic peptide
DASNRAT

SEQ ID NO: 1916 - protein, 7 aa, Artificial Sequence
  Description of Artificial Sequence: Synthetic peptide
DASNRAT

SEQ ID NO: 1917 - protein, 7 aa, Artificial Sequence
  Description of Artificial Sequence: Synthetic peptide
DASNRAT

SEQ ID NO: 1918 - protein, 7 aa, Artificial Sequence
  Description of Artificial Sequence: Synthetic peptide
DASNRAT

SEQ ID NO: 1919 - protein, 7 aa, Artificial Sequence
  Description of Artificial Sequence: Synthetic peptide
DVSNRPS

SEQ ID NO: 1920 - protein, 7 aa, Artificial Sequence
  Description of Artificial Sequence: Synthetic peptide
EVSNRPS

SEQ ID NO: 1921 - protein, 8 aa, Artificial Sequence
  Description of Artificial Sequence: Synthetic peptide
QQYYSTPH

SEQ ID NO: 1922 - protein, 10 aa, Artificial Sequence
  Description of Artificial Sequence: Synthetic peptide
QQRSNWPPYT

SEQ ID NO: 1923 - protein, 10 aa, Artificial Sequence
  Description of Artificial Sequence: Synthetic peptide
QQRSNWPPYT

SEQ ID NO: 1924 - protein, 10 aa, Artificial Sequence
  Description of Artificial Sequence: Synthetic peptide
QQRSNWPPYT

SEQ ID NO: 1925 - protein, 10 aa, Artificial Sequence
  Description of Artificial Sequence: Synthetic peptide
QQRSNWPPYT

SEQ ID NO: 1926 - protein, 10 aa, Artificial Sequence
  Description of Artificial Sequence: Synthetic peptide
QQRSNWPPYT

SEQ ID NO: 1927 - protein, 9 aa, Artificial Sequence
  Description of Artificial Sequence: Synthetic peptide
SSYTSSSVV

SEQ ID NO: 1928 - protein, 10 aa, Artificial Sequence
  Description of Artificial Sequence: Synthetic peptide
SSYTSSSTLV

SEQ ID NO: 1929 - protein, 119 aa, Artificial Sequence
  Description of Artificial Sequence: Synthetic polypeptide
QVQLVESGGGVVQPGRSLRLSCAASGFTFSSYGMHWVRQAPGKGLEWVAVISYDGSNKYYADSVKGRFTISRDNSKNTLYLQMNSLRAEDTAVYYCAKDYGDYGAFDIWGQGTMVTVSS

SEQ ID NO: 1930 - protein, 118 aa, Artificial Sequence; identical to SEQ ID NO: 1540
  Description of Artificial Sequence: Synthetic polypeptide

SEQ ID NO: 1931 - protein, 118 aa, Artificial Sequence; identical to SEQ ID NO: 1540
  Description of Artificial Sequence: Synthetic polypeptide

SEQ ID NO: 1932 - protein, 118 aa, Artificial Sequence; identical to SEQ ID NO: 1540
  Description of Artificial Sequence: Synthetic polypeptide

SEQ ID NO: 1933 - protein, 118 aa, Artificial Sequence; identical to SEQ ID NO: 1540
  Description of Artificial Sequence: Synthetic polypeptide

SEQ ID NO: 1934 - protein, 118 aa, Artificial Sequence; identical to SEQ ID NO: 1540
  Description of Artificial Sequence: Synthetic polypeptide

SEQ ID NO: 1935 - protein, 119 aa, Artificial Sequence
  Description of Artificial Sequence: Synthetic polypeptide
QITLKESGPTLVKPTQTLTLTCTFSGFSLSTSGVGVGWIRQPPGKALEWLALIYWDDDKRYSPSLKSRLTITKDTSKNQVVLTMTNLDPVDTATYYCAHLTTLTIFDYWGQGTLVTVSS

SEQ ID NO: 1936 - protein, 119 aa, Artificial Sequence
  Description of Artificial Sequence: Synthetic polypeptide
QITLKESGPTLVKPTQTLTLTCTFSGFSPSTSGVGVGWIRQPPGKALEWLALIYWDDDKRYSPSLKSRLTITQDTSKNQVVLTMTNMDPVDTATYYCAHHSVATIWDYWGQGTLVTVSS

SEQ ID NO: 1937 - protein, 112 aa, Artificial Sequence
  Description of Artificial Sequence: Synthetic polypeptide
DIVMTQSPDSLAVSLGERATINCKSSQSVLYSSNNKNYLAWYQQKPGQPPKLLIYWASTRESGVPDRFSGSGSGTDFTLTISSLQAEDVAVYYCQQYYSTPHFGPGTKVDIK

SEQ ID NO: 1938 - protein, 108 aa, Artificial Sequence; identical to SEQ ID NO: 1775
  Description of Artificial Sequence: Synthetic polypeptide

SEQ ID NO: 1939 - protein, 108 aa, Artificial Sequence; identical to SEQ ID NO: 1775
  Description of Artificial Sequence: Synthetic polypeptide

SEQ ID NO: 1940 - protein, 108 aa, Artificial Sequence; identical to SEQ ID NO: 1775
  Description of Artificial Sequence: Synthetic polypeptide

SEQ ID NO: 1941 - protein, 108 aa, Artificial Sequence; identical to SEQ ID NO: 1775
  Description of Artificial Sequence: Synthetic polypeptide

SEQ ID NO: 1942 - protein, 108 aa, Artificial Sequence; identical to SEQ ID NO: 1775
  Description of Artificial Sequence: Synthetic polypeptide

SEQ ID NO: 1943 - protein, 109 aa, Artificial Sequence
  Description of Artificial Sequence: Synthetic polypeptide
QSALTQPASVSGSPGQSITISCTGASSDVGAYNYVSWYQQHPGKAPKLMIYDVSNRPSGVSNRFSGSKSGNTASLTISGLQAEDEADYFCSSYTSSSVVFGGGTKLTVL

SEQ ID NO: 1944 - protein, 110 aa, Artificial Sequence
  Description of Artificial Sequence: Synthetic polypeptide
QSALTQPASVSGSPGQSITISCTGTRSDVGGYNYVSWYQHHPGKAPKLMIYEVSNRPSGVSNRFSGSKSGNTASLTISGLQAEDEADYYCSSYTSSSTLVFGGGTKLTVL
